(19) United States
(12) Patent Application Publication
(10) Pub. No.: US 2004/0197778 A1
(43) Pub. Date: Oct. 7, 2004

(54) Novel compositions and methods in cancer

(75) Inventors: David W. Morris, Davis, CA (US); Marc S. Malandro, Davis, CA (US)

Correspondence Address: MORRISON & FOERSTER LLP, 755 PAGE MILL RD, PALO ALTO, CA, 94304-1018, US

(73) Assignee: Sagres Discovery, inc.

(21) Appl. No.: 10/331,053

(22) Filed: Dec. 26, 2002

(51) Int. Cl. C12Q 1/68; C07H 21/04; C07K 16/30; C07K 14/47

(52) U.S. Cl. 435/6; 536/23.5; 435/69.1; 435/320.1; 435/325; 530/350

(57) ABSTRACT

The present invention relates to novel sequences for use in detection, diagnosis and treatment of cancers, especially lymphomas. The invention provides cancer-associated (CA) polynucleotide sequences whose expression is dys-regulated in cancer tissues. The present invention provides CA polypeptides associated with cancer and provides diagnostic compositions and methods for the detection of cancer. The present invention provides monoclonal and polyclonal antibodies specific for the CA polypeptides. The present invention also provides diagnostic tools and therapeutic compositions and methods for screening, prevention and treatment of cancer.

### CROSS-REFERENCE TO RELATED APPLICATIONS

[0001] This application is related to U.S. Applications entitled “Novel Compositions and Methods in Cancer,” U.S. Ser. No. 10/034,650, filed Dec. 20, 2001; U.S. Ser. No. 10/035,832, filed Dec. 26, 2001; U.S. Ser. No. 10/004,113, filed Oct. 23, 2001; U.S. Ser. No. 09/997,722, filed Nov. 30, 2001; U.S. Ser. No. 10/085,117, filed Feb. 27, 2002; U.S. Ser. No. 10/0387,192, filed Mar. 1, 2002; Docket No. 52945-2001000, filed Dec. 16, 2002. This application also related to U.S. Application entitled “Novel Therapeutic Targets in Cancer,” docket number 52945-2001200 filed Dec. 16, 2002. All of the above-mentioned applications are expressly incorporated herein by reference in their entirety.

### DESCRIPTION OF ACCOMPANYING CD-ROMS

[0002] Tables 1-13 are filed herewith in CD-ROM in accordance with 37 C.F.R. §§ 1.52 and 1.58. Two identical copies (marked “Copy 1” and “Copy 2”) of this CD-ROM are submitted.

[0003] Contents of the CD-ROM disks submitted herewith are hereby incorporated by reference into the Specification.

### TECHNICAL FIELD OF THE INVENTION

[0004] This invention relates generally to the field of cancer-associated genes. Specifically, it relates to novel sequences for use in diagnosis and treatment of cancer and tumors, as well as the use of the novel compositions in screening methods. More specifically, it relates to novel genes whose expressions are dys-regulated (up or down) in cancer tissue The present invention provides methods of using cancer associated polynucleotides, their corresponding gene products and antibodies specific for the gene products in the detection, diagnosis, prevention and/or treatment of associated cancers.

### BACKGROUND OF THE INVENTION

[0005] Oncogenes are genes that can cause cancer. Carcinogenesis can occur by a wide variety of mechanisms, including infection of cells by viruses containing oncogenes, activation of protooncogenes in the host genome, and mutations of protooncogenes and tumor suppressor genes. Carcinogenesis is fundamentally driven by somatic cell evolution (i.e. mutation and natural selection of variants with progressive loss of growth control). The genes that serve as targets for these somatic mutations are classified as either protooncogenes or tumor suppressor genes, depending on whether their mutant phenotypes are dominant or recessive, respectively.

[0006] There are a number of viruses known to be involved in human cancer as well as in animal cancer. Of particular interest here are viruses that do not contain oncogenes themselves; these are slow-transforming retroviruses. They induce tumors by integrating into the host genome and affecting neighboring protooncogenes in a variety of ways. Provirus insertion mutation is a normal consequence of the retroviral life cycle. In infected cells, a DNA copy of the retrovirus genome (called a provirus) is integrated into the host genome. A newly integrated provirus can affect gene expression in cis at or near the integration site by one of two mechanisms. Type I insertion mutations up-regulate transcription of proximal genes as a consequence of regulatory sequences (enhancers and/or promoters) within the proviral long terminal repeats (LTRs). Type II insertion mutations cause truncation of coding regions due to either integration directly within an open reading frame or integration within an intron flanked on both sides by coding sequences. The analysis of sequences at or near the insertion sites has led to the identification of a number of new protooncogenes.

[0007] With respect to lymphoma and leukemia, retroviruses such as AKV murine leukemia virus (MLV) or SL3-3 MLV, are potent inducers of tumors when inoculated into susceptible newborn mice, or when carried in the germline. A number of sequences have been identified as relevant in the induction of lymphoma and leukemia by analyzing the insertion sites; see Sorensen et al., J. of Virology 74:2161 (2000); Hansen et al., Genome Res. 10(2):237-43 (2000); Sorensen et al., J. Virology 70:4063 (1996); Sorensen et al., J. Virology 67:7118 (1993); Joosten et al., Virology 268:308 (2000); and Li et al., Nature Genetics 23:348 (1999); all of which are expressly incorporated by reference herein. With respect to cancers, especially breast cancer, prostate cancer and cancers with epithelial origin, the mammalian retrovirus, mouse mammary tumor virus (MMTV) is a potent inducer of tumors when inoculated into susceptible newborn mice, or when carried in the germ line. Mammary Tumors in the Mouse, edited by J. Hilgers and M. Sluyser; Elsevier/North-Holland Biomedical Press; New York, N.Y.

[0008] The pattern of gene expression in a particular living cell is characteristic of its current state. Nearly all differences in the state or type of a cell are reflected in the differences in RNA levels of one or more genes. Comparing expression patterns of uncharacterized genes may provide clues to their function. High throughput analysis of expression of hundreds or thousands of genes can help in (a) identification of complex genetic diseases, (b) analysis of differential gene expression over time, between tissues and disease states, and (c) drug discovery and toxicology studies. Increase or decrease in the levels of expression of certain genes correlate with cancer biology. For example, oncogenes are positive regulators of tumorigenesis, while tumor suppressor genes are negative regulators of tumorigenesis. (Marshall, Cell, 64: 313-326 (1991); Weinberg, Science, 254: 1138-1146 (1991)).

[0009] Accordingly, it is an object of the invention to provide polynucleotide and polypeptide sequences involved in cancer and, in particular, in oncogenesis.

[0010] Immunotherapy, or the use of antibodies for therapeutic purposes has been used in recent years to treat cancer. Passive immunotherapy involves the use of monoclonal antibodies in cancer treatments. See for example, Cancer: Principles and Practice of Oncology, 6^{th} Edition (2001) Chapt. 20 pp. 495-508. Inherent therapeutic biological activity of these antibodies include direct inhibition of tumor cell growth or survival, and the ability to recruit the natural cell killing activity of the body's immune system. These agents are administered alone or in conjunction with radiation or chemotherapeutic agents. Rituxan® and Herceptin®, approved for treatment of lymphoma and breast cancer, respectively, are two examples of such therapeutics. Alternatively, antibodies are used to make antibody conjugates where the antibody is linked to a toxic agent and directs that agent to the tumor by specifically binding to the tumor. Mylotarg® is an example of an approved antibody conjugate used for the treatment of leukemia.

[0011] Accordingly, it is another object of this invention to provide antigens (cancer-associated polypeptides) associated with a variety of cancers as targets for diagnostic and/or therapeutic antibodies. These antigens are also useful for drug discovery (e.g., small molecules) and for further characterization of cellular regulation, growth, and differentiation.

### SUMMARY OF THE INVENTION

[0012] The present invention provides novel human gene sequences (hD U-001 through hD U-013, and hR U-001 through hR U-013 as shown in Tables 1-13) whose expression is dys-regulated in various types of cancer. In one embodiment. the expression of these genes is up-regulated in cancer tissue relative to expression in normal tissue. These nucleic acids encode human proteins hP U-001 through hP U-013 shown in Tables 1-13 whose presence in cancer tissue is also dys-regulated.

[0013] Accordingly, the present invention provides methods for screening for compositions that modulate cancer, especially lymphoma and leukemia. The present invention also provides methods for screening for compositions which modulate carcinomas, especially mammary adenocarcinomas. Also provided herein are methods of inhibiting proliferation of a cell, preferably a lymphoma cell or a breast cancer cell. Methods of treatment of cancer, including diagnosis, using one or more of the nucleic acid and protein sequences in Tables 1-13, are also provided herein.

[0014] In one aspect, a method of screening drug candidates comprises providing a cell that expresses a cancer-associated (CA) gene or fragments thereof. Preferred embodiments of CA genes are genes that are differentially expressed in cancer cells, preferably lymphatic, breast, prostate or epithelial cells, compared to other cells. Preferred embodiments of CA genes used in the methods herein include, but are not limited to the nucleic acids selected from Tables 1-3 (hD U-001 through hD U-013; and hR U-001 through hR U-013). The methods further include adding a drug candidate to the cell and determining the effect of the drug candidate on the expression of the CA gene.

[0015] In one embodiment, the method of screening drug candidates includes comparing the level of expression in the absence of the drug candidate to the level of expression in the presence of the drug candidate. In one embodiment, the drug candidate lowers the level of expression of one or more of the CA genes of the invention.

[0016] Also provided herein is a method of screening for a bioactive agent capable of binding to a CA protein (CAP), the method comprising combining the CAP and a candidate bioactive agent, and determining the binding of the candidate agent to the CAP.

[0017] Further provided herein is a method for screening for a bioactive agent capable of modulating the activity of a CAP. In one embodiment, the method comprises combining the CAP and a candidate bioactive agent, and determining the effect of the candidate agent on the bioactivity of the CAP. In one preferred embodiment, the bioactive agent lowers the level of expression of one or more of the CA genes of the invention.

[0018] Also provided is a method of evaluating the effect of a candidate cancer drug comprising administering the drug to a patient and removing a cell sample from the patient. The expression profile of the cell is then determined. This method may further comprise comparing the expression profile of the patient to an expression profile of a healthy individual.

[0019] In a further aspect, a method for inhibiting the activity of a CA protein is provided. In one embodiment, the method comprises administering to a patient an inhibitor of a CA protein preferably selected from the group consisting of the sequences outlined in Tables 1-13 (hP U-001 through hP U-013).

[0020] A method of neutralizing the effect of a CA protein, preferably a protein encoded by a nucleic acid selected from the group of sequences outlined in Tables 1-13 (hD U-001 through hD U-013; and hR U-001 through hR U-013), is also provided. Preferably, the method comprises contacting an agent specific for said protein with said protein in an amount sufficient to effect neutralization. In one embodiment, such an agent is an antobody, preferably a monoclonal antobody. In some embodiments, monoclonal antobodies against hP U-001 through hP U-013 acoupled to detectable signals (for diagnosis) or therapeutic agents (for treatment).

[0021] Moreover, provided herein is a biochip comprising a nucleic acid segment which encodes a CA protein, preferably selected from the sequences outlined in Tables 1-13 (hR U-001 through hR U-013).

[0022] Also provided herein is a method for diagnosing or determining the propensity to cancers, especially lymphoma or leukemia or carcinoma by sequencing at least one carcinoma or lymphoma gene of an individual. In yet another aspect of the invention, a method is provided for determining cancer including lymphoma and leukemia gene copy numbers in an individual.

[0023] Novel sequences associated with cancer are provided herein. Other aspects of the invention will become apparent to the skilled artisan by the following description of the invention.

### BRIEF DESCRIPTION OF THE FIGURES

[0024] FIG. 1 depicts PCR amplification of host-provirus junction fragments.

### DETAILED DESCRIPTION OF PREFERRED EMBODIMENTS

[0025] The present invention is directed to a number of sequences associated with cancers, especially lymphoma, breast cancer or prostate cancer. The relatively tight linkage between clonally-integrated proviruses and protooncogenes forms “provirus tagging”, in which slow-transforming retroviruses that act by an insertion mutation mechanism are used to isolate protooncogenes. In some models, uninfected animals have low cancer rates, and infected animals have high cancer rates. It is known that many of the retroviruses involved do not carry transduced host protooncogenes or pathogenic trans-acting viral genes, and thus the cancer incidence must therefore be a direct consequence of proviral integration effects into host protooncogenes. Since proviral integration is random, rare integrants will “activate” host protooncogenes that provide a selective growth advantage, and these rare events result in new proviruses at clonal stoichiometries in tumors. In contrast to mutations caused by chemicals, radiation, or spontaneous errors, protooncogene insertion mutations can be easily located by virtue of the fact that a convenient-sized genetic marker of known sequence (the provirus) is present at the site of mutation. Host sequences that flank clonally integrated proviruses can be cloned using a variety of strategies. Once these sequences are in hand, the tagged protooncogenes can be subsequently identified. The presence of provirus at the same locus in two or more independent tumors is prima facie evidence that a protooncogene is present at or very near the provirus integration sites. This is because the genome is too large for random integrations to result in observable clustering. Any clustering that is detected is unequivocal evidence for biological selection (i.e. the tumor phenotype). Moreover, the pattern of proviral integrants (including orientations) provides compelling positional information that makes localization of the target gene at each cluster relatively simple. The three mammalian retroviruses that are known to cause cancer by an insertion mutation mechanism are FeLV (leukemia/lymphoma in cats), MLV (leukemia/lymphoma in mice and rats), and MMTV (mammary cancer in mice).

[0026] Thus, the use of oncogenic retroviruses, whose sequences insert into the genome of the host organism resulting in cancer, allows the identification of host sequences involved in cancer. These sequences may then be used in a number of different ways, including diagnosis, prognosis, screening for modulators (including both agonists and antagonists), antibody generation (for immunotherapy and imaging), etc. However, as will be appreciated by those in the art, oncogenes that are identified in one type of cancer such as lymphoma or leukemia have a strong likelihood of being involved in other types of cancers as well. Thus, while the sequences outlined herein are initially identified as correlated with lymphoma, they can also be found in other types of cancers as well, outlined below.

[0027] Definitions

[0028] Accordingly, the present invention provides nucleic acid and protein sequences that are associated with cancer, herein termed “cancer associated” or “CA” sequences. In one embodiment, the present invention provides nucleic acid and protein sequences that are associated with cancers that originate in lymphatic tissue, herein termed “lymphoma associated,” “leukemia associated” or “LA” sequences. In another embodiment, the present invention provides nucleic acid and protein sequences that are associated with carcinomas which originate in breast tissue, herein termed “breast cancer associated” or “BC” sequences.

[0029] Suitable cancers that can be diagnosed or screened for using the methods of the present invention include cancers classified by site or by histological type. Cancers classified by site include cancer of the oral cavity and pharynx (lip, tongue, salivary gland, floor of mouth, gum and other mouth, nasopharynx, tonsil, oropharynx, hypopharynx, other oral/pharynx); cancers of the digestive system (esophagus; stomach; small intestine; colon and rectum; anus, anal canal, and anorectum; liver; intrahepatic bile duct; gallbladder; other biliary; pancreas; retroperitoneum; peritoneum, omentum, and mesentery; other digestive); cancers of the respiratory system (nasal cavity, middle ear, and sinuses; larynx; lung and bronchus; pleura; trachea, mediastinum, and other respiratory); cancers of the mesothelioma; bones and joints; and soft tissue, including heart; skin cancers, including melanomas and other non-epithelial skin cancers; Kaposi's sarcoma and breast cancer; cancer of the female genital system (cervix uteri; corpus uteri; uterus, nos; ovary; vagina; vulva; and other female genital); cancers of the male genital system (prostate gland; testis; penis; and other male genital); cancers of the urinary system (urinary bladder; kidney and renal pelvis; ureter; and other urinary); cancers of the eye and orbit; cancers of the brain and nervous system (brain; and other nervous system); cancers of the endocrine system (thyroid gland and other endocrine, including thymus); lymphomas (Hodgkin's disease and non-Hodgkin's lymphoma), multiple myeloma, and leukemias (lymphocytic leukemia; myeloid leukemia; monocytic leukemia; and other leukemias).

[0030] Other cancers, classified by histological type, that may be associated with the sequences of the invention include, but are not limited to, Neoplasm, malignant; Carcinoma, NOS; Carcinoma, undifferentiated, NOS; Giant and spindle cell carcinoma; Small cell carcinoma, NOS; Papillary carcinoma, NOS; Squamous cell carcinoma, NOS; Lymphoepithelial carcinoma; Basal cell carcinoma, NOS; Pilomatrix carcinoma; Transitional cell carcinoma, NOS; Papillary transitional cell carcinoma; Adenocarcinoma, NOS; Gastrinoma, malignant; Cholangiocarcinoma; Hepatocellular carcinoma, NOS; Combined hepatocellular carcinoma and cholangiocarcinoma; Trabecular adenocarcinoma; Adenoid cystic carcinoma; Adenocarcinoma in adenomatous polyp; Adenocarcinoma, familial polyposis coli; Solid carcinoma, NOS; Carcinoid tumor, malignant; Bronchiolo-alveolar adenocarcinoma; Papillary adenocarcinoma, NOS; Chromophobe carcinoma; Acidophil carcinoma; Oxyphilic adenocarcinoma; Basophil carcinoma; Clear cell adenocarcinoma, NOS; Granular cell carcinoma; Follicular adenocarcinoma, NOS; Papillary and follicular adenocarcinoma; Nonencapsulating sclerosing carcinoma; Adrenal cortical carcinoma; Endometroid carcinoma; Skin appendage carcinoma; Apocrine adenocarcinoma; Sebaceous adenocarcinoma; Ceruminous adenocarcinoma; Mucoepidermoid carcinoma; Cystadenocarcinoma, NOS; Papillary cystadenocarcinoma, NOS; Papillary serous cystadenocarcinoma; Mucinous cystadenocarcinoma, NOS; Mucinous adenocarcinoma; Signet ring cell carcinoma; Infiltrating duct carcinoma; Medullary carcinoma, NOS; Lobular carcinoma; Inflammatory carcinoma; Paget's disease, mammary; Acinar cell carcinoma; Adenosquamous carcinoma; Adenocarcinoma w/ squamous metaplasia; Thymoma, malignant; Ovarian stromal tumor, malignant; Thecoma, malignant; Granulosa cell tumor, malignant; Androblastoma, malignant; Sertoli cell carcinoma; Leydig cell tumor, malignant; Lipid cell tumor, malignant; Paraganglioma, malignant; Extra-mammary paraganglioma, malignant; Pheochromocytoma; Glomangiosarcoma; Malignant melanoma, NOS; Amelanotic melanoma; Superficial spreading melanoma; Malig melanoma in giant pigmented nevus; Epithelioid cell melanoma; Blue nevus, malignant; Sarcoma, NOS; Fibrosarcoma, NOS; Fibrous histiocytoma, malignant; Myxosarcoma; Liposarcoma, NOS; Leiomyosarcoma, NOS; Rhabdomyosarcoma, NOS; Embryonal rhabdomyosarcoma; Alveolar rhabdomyosarcoma; Stromal sarcoma, NOS; Mixed tumor, malignant, NOS; Mullerian mixed tumor; Nephroblastoma; Hepatoblastoma; Carcinosarcoma, NOS; Mesenchymoma, malignant; Brenner tumor, malignant; Phyllodes tumor, malignant; Synovial sarcoma, NOS; Mesothelioma, malignant; Dysgerminoma; Embryonal carcinoma, NOS; Teratoma, malignant, NOS; Struma ovarii, malignant; Choriocarcinoma; Mesonephroma, malignant; Hemangiosarcoma; Hemangioendothelioma, malignant; Kaposi's sarcoma; Hemangiopericytoma, malignant; Lymphangiosarcoma; Osteosarcoma, NOS; Juxtacortical osteosarcoma; Chondrosarcoma, NOS; Chondroblastoma, malignant; Mesenchymal chondrosarcoma; Giant cell tumor of bone; Ewing's sarcoma; Odontogenic tumor, malignant; Ameloblastic odontosarcoma; Ameloblastoma, malignant; Ameloblastic fibrosarcoma; Pinealoma, malignant; Chordoma; Glioma, malignant; Ependymoma, NOS; Astrocytoma, NOS; Protoplasmic astrocytoma; Fibrillary astrocytoma; Astroblastoma; Glioblastoma, NOS; Oligodendroglioma, NOS; Oligodendroblastoma; Primitive neuroectodermal; Cerebellar sarcoma, NOS; Ganglioneuroblastoma; Neuroblastoma, NOS; Retinoblastoma, NOS; Olfactory neurogenic tumor; Meningioma, malignant; Neurofibrosarcoma; Neurilemmoma, malignant; Granular cell tumor, malignant; Malignant lymphoma, NOS; Hodgkin's disease, NOS; Hodgkin's; paragranuloma, NOS; Malignant lymphoma, small lymphocytic; Malignant lymphoma, large cell, diffuse; Malignant lymphoma, follicular, NOS; Mycosis fungoides; Other specified non-Hodgkin's lymphomas; Malignant histiocytosis; Multiple myeloma; Mast cell sarcoma; Immunoproliferative small intestinal disease; Leukemia, NOS; Lymphoid leukemia, NOS; Plasma cell leukemia; Erythroleukemia; Lymphosarcoma cell leukemia; Myeloid leukemia, NOS; Basophilic leukemia; Eosinophilic leukemia; Monocytic leukemia, NOS; Mast cell leukemia; Megakaryoblastic leukemia; Myeloid sarcoma; and Hairy cell leukemia.

[0031] In addition, the CA genes may be involved in other diseases such as, but not limited to, diseases associated with aging or neurodegeneration.

[0032] “Association” in this context means that the nucleotide or protein sequences are either differentially expressed, activated, inactivated or altered in cancers as compared to normal tissue. As outlined below, CA sequences include those that are up-regulated (i.e. expressed at a higher level), as well as those that are down-regulated (i.e. expressed at a lower level), in cancers. CA sequences also include sequences that have been altered (i.e., truncated sequences or sequences with substitutions, deletions or insertions, including point mutations) and show either the same expression profile or an altered profile. In a preferred embodiment, the CA sequences are from humans; however, as will be appreciated by those in the art, CA sequences from other organisms may be useful in animal models of disease and drug evaluation; thus, other CA sequences are provided, from vertebrates, including mammals, including rodents (rats, mice, hamsters, guinea pigs, etc.), primates, and farm animals (including sheep, goats, pigs, cows, horses, etc). In some cases, prokaryotic CA sequences may be useful. CA sequences from other organisms may be obtained using the techniques outlined below.

[0033] CA sequences include both nucleic acid and amino acid sequences. In a preferred embodiment, the CA sequences are recombinant nucleic acids. By the term “recombinant nucleic acid” herein is meant nucleic acid, originally formed in vitro, in general, by the manipulation of nucleic acid by polymerases and endonucleases, in a form not normally found in nature. Thus a recombinant nucleic acid is also an isolated nucleic acid, in a linear form, or cloned in a vector formed in vitro by ligating DNA molecules that are not normally joined, are both considered recombinant for the purposes of this invention. It is understood that once a recombinant nucleic acid is made and reintroduced into a host cell or organism, it will replicate using the in vivo cellular machinery of the host cell rather than in vitro manipulations; however, such nucleic acids, once produced recombinantly, although subsequently replicated in vivo, are still considered recombinant or isolated for the purposes of the invention. As used herein a “polynucleotide” or “nucleic acid” is a polymeric form of nucleotides of any length, either ribonucleotides or deoxyribonucleotides. This term refers only to the primary structure of the molecule. Thus, this term includes double- and single-stranded DNA and RNA. It also includes known types of modifications, for example, labels which are known in the art, methylation, “caps”, substitution of one or more of the naturally occurring nucleotides with an analog, internucleotide modifications such as, for example, those with uncharged linkages (e.g., phosphorothioates, phosphorodithioates, etc.), those containing pendant moieties, such as, for example proteins (including e.g., nucleases, toxins, antibodies, signal peptides, poly-L-lysine, etc.), those with intercalators (e.g., acridine, psoralen, etc.), those containing chelators (e.g., metals, radioactive metals, etc.), those containing alkylators, those with modified linkages (e.g., alpha anomeric nucleic acids, etc.), as well as unmodified forms of the polynucleotide.

[0034] As used herein, a polynucleotide “derived from” a designated sequence refers to a polynucleotide sequence which is comprised of a sequence of approximately at least about 6 nucleotides, preferably at least about 8 nucleotides, more preferably at least about 10-12 nucleotides, and even more preferably at least about 15-20 nucleotides corresponding to a region of the designated nucleotide sequence. “Corresponding” means homologous to or complementary to the designated sequence. Preferably, the sequence of the region from which the polynucleotide is derived is homologous to or complementary to a sequence that is unique to a CA gene.

[0035] Similarly, a “recombinant protein” is a protein made using recombinant techniques, i.e. through the expression of a recombinant nucleic acid as depicted above. A recombinant protein is distinguished from naturally occurring protein by at least one or more characteristics. For example, the protein may be isolated or purified away from some or all of the proteins and compounds with which it is normally associated in its wild type host, and thus may be substantially pure. For example, an isolated protein is unaccompanied by at least some of the material with which it is normally associated in its natural state, preferably constituting at least about 0.5%, more preferably at least about 5% by weight of the total protein in a given sample. A substantially pure protein comprises about 50-75% by weight of the total protein, with about 80% being preferred, and about 90% being particularly preferred. The definition includes the production of a CA protein from one organism in a different organism or host cell. Alternatively, the protein may be made at a significantly higher concentration than is normally seen, through the use of an inducible promoter or high expression promoter, such that the protein is made at increased concentration levels. Alternatively, the protein may be in a form not normally found in nature, as in the addition of an epitope tag or amino acid substitutions, insertions and deletions, as discussed below.

[0036] In a preferred embodiment, the CA sequences are nucleic acids. As will be appreciated by those in the art and is more fully outlined below, CA sequences are useful in a variety of applications, including diagnostic applications, which will detect naturally occurring nucleic acids, as well as screening applications; for example, biochips comprising nucleic acid probes to the CA sequences can be generated. In the broadest sense, use of “nucleic acid,” “polynucleotide” or “oligonucleotide” or equivalents herein means at least two nucleotides covalently linked together. In some embodiments, an oligonucleotide is an oligomer of 6, 8, 10, 12, 20, 30 or up to 100 nucleotides. A “polynucleotide” or “oligonucleotide” may comprise DNA, RNA, PNA or a polymer of nucleotides linked by phosphodiester and/or any alternate bonds.

[0037] A nucleic acid of the present invention generally contains phosphodiester bonds, although in some cases, as outlined below (for example, in antisense applications or when a nucleic acid is a candidate drug agent), nucleic acid analogs may have alternate backbones, comprising, for example, phosphoramidate (Beaucage et al., Tetrahedron 49(10):1925 (1993) and references therein; Letsinger, J. Org. Chem. 35:3800 (1970); Sprinzl et al., Eur. J. Biochem. 81:579 (1977); Letsinger et al., Nucl. Acids Res. 14:3487 (1986); Sawai et al, Chem. Lett. 805 (1984), Letsinger et al., J. Am. Chem. Soc. 110:4470 (1988); and Pauwels et al., Chemica Scripta 26:141 91986)), phosphorothioate (Mag et al., Nucleic Acids Res. 19:1437 (1991); and U.S. Pat. No. 5;644,048), phosphorodithioate (Briu et al., J. Am. Chem. Soc. 111:2321 (1989), O-methylphosphoroamidite linkages (see Eckstein, Oligonucleotides and Analogues: A Practical Approach, Oxford University Press), and peptide nucleic acid backbones and linkages (see Egholm, J. Am. Chem. Soc. 114:1895 (1992); Meier et al., Chem. Int. Ed. Engl. 31:1008 (1992); Nielsen, Nature, 365:566 (1993); Carlsson et al., Nature 380:207 (1996), all of which are incorporated by reference). Other analog nucleic acids include those with positive backbones (Denpcy et al., Proc. Natl. Acad. Sci. USA 92:6097 (1995); non-ionic backbones (U.S. Pat. Nos. 5,386,023, 5,637,684, 5,602,240, 5,216,141 and 4,469,863; Kiedrowshi et al., Angew. Chem. Intl. Ed. English 30:423 (1991); Letsinger et al., J. Am. Chem. Soc. 110:4470 (1988); Letsinger et al., Nucleoside & Nucleotide 13:1597 (1994); Chapters 2 and 3, ASC Symposium Series 580, “Carbohydrate Modifications in Antisense Research”, Ed. Y. S. Sanghui and P. Dan Cook; Mesmaeker et al., Bioorganic & Medicinal Chem. Lett. 4:395 (1994); Jeffs et al., J. Biomolecular NMR 34:17 (1994); Tetrahedron Lett. 37:743 (1996)) and non-ribose backbones, including those described in U.S. Pat. Nos. 5,235,033 and 5,034,506, and Chapters 6 and 7, ASC Symposium Series 580, “Carbohydrate Modifications in Antisense Research”, Ed. Y. S. Sanghui and P. Dan Cook. Nucleic acids containing one or more carbocyclic sugars are also included within one definition of nucleic acids (see Jenkins et al., Chem. Soc. Rev. (1995) pp 169-176). Several nucleic acid analogs are described in Rawls, C & E News Jun. 2, 1997 page 35. All of these references are hereby expressly incorporated by reference. These modifications of the ribose-phosphate backbone may be done for a variety of reasons, for example to increase the stability and half-life of such molecules in physiological environments for use in anti-sense applications or as probes on a biochip.

[0038] As will be appreciated by those in the art, all of these nucleic acid analogs may find use in the present invention. In addition, mixtures of naturally occurring nucleic acids and analogs can be made; alternatively, mixtures of different nucleic acid analogs, and mixtures of naturally occurring nucleic acids and analogs may be made.

[0039] The nucleic acids may be single stranded or double stranded, as specified, or contain portions of both double stranded or single stranded sequence. As will be appreciated by those in the art, the depiction of a single strand “Watson” also defines the sequence of the other strand “Crick”; thus the sequences described herein also includes the complement of the sequence. The nucleic acid may be DNA, both genomic and cDNA, RNA, or a hybrid, where the nucleic acid contains any combination of deoxyribo- and ribo-nucleotides, and any combination of bases, including uracil, adenine, thymine, cytosine, guanine, inosine, xanthine, hypoxanthine, isocytosine, isoguanine, etc. As used herein, the term “nucleoside” includes nucleotides and nucleoside and nucleotide analogs, and modified nucleosides such as amino modified nucleosides. In addition, “nucleoside” includes non-naturally occurring analog structures. Thus for example the individual units of a peptide nucleic acid, each containing a base, are referred to herein as a nucleoside.

[0040] As used herein, the term “tag,” “sequence tag” or “primer tag sequence” refers to an oligonucleotide with specific nucleic acid sequence that serves to identify a batch of polynucleotides bearing such tags therein. Polynucleotides from the same biological source are covalently tagged with a specific sequence tag so that in subsequent analysis the polynucleotide can be identified according to its source of origin. The sequence tags also serve as primers for nucleic acid amplification reactions.

[0041] A “microarray” is a linear or two-dimensional array of preferably discrete regions, each having a defined area, formed on the surface of a solid support. The density of the discrete regions on a microarray is determined by the total numbers of target polynucleotides to be detected on the surface of a single solid phase support, preferably at least about 50/cm², more preferably at least about 100/cm², even more preferably at least about 500/cm², and still more preferably at least about 1,000/cm². As used herein, a DNA microarray is an array of oligonucleotide primers placed on a chip or other surfaces used to amplify or clone target polynucleotides. Since the position of each particular group of primers in the array is known, the identities of the target polynucleotides can be determined based on their binding to a particular position in the microarray.

[0042] A “linker” is a synthetic oligodeoxyribonucleotide that contains a restriction site. A linker may be blunt end-ligated onto the ends of DNA fragments to create restriction sites that can be used in the subsequent cloning of the fragment into a vector molecule.

[0043] The term “label” refers to a composition capable of producing a detectable signal indicative of the presence of the target polynucleotide in an assay sample. Suitable labels include radioisotopes, nucleotide chromophores, enzymes, substrates, fluorescent molecules, chemiluminescent moieties, magnetic particles, bioluminescent moieties, and the like. As such, a label is any composition detectable by spectroscopic, photochemical, biochemical, immunochemical, electrical, optical, chemical, or any other appropriate means. The term “label” is used to refer to any chemical group or moiety having a detectable physical property or any compound capable of causing a chemical group or moiety to exhibit a detectable physical property, such as an enzyme that catalyzes conversion of a substrate into a detectable product. The term “label” also encompasses compounds that inhibit the expression of a particular physical property. The label may also be a compound that is a member of a binding pair, the other member of which bears a detectable physical property.

[0044] The term “support” refers to conventional supports such as beads, particles, dipsticks, fibers, filters, membranes, and silane or silicate supports such as glass slides.

[0045] The term “amplify” is used in the broad sense to mean creating an amplification product which may include, for example, additional target molecules, or target-like molecules or molecules complementary to the target molecule, which molecules are created by virtue of the presence of the target molecule in the sample. In the situation where the target is a nucleic acid, an amplification product can be made enzymatically with DNA or RNA polymerases or reverse transcriptases.

[0046] As used herein, a “biological sample” refers to a sample of tissue or fluid isolated from an individual, including but not limited to, for example, blood, plasma, serum, spinal fluid, lymph fluid, skin, respiratory, intestinal and genitourinary tracts, tears, saliva, milk, cells (including but not limited to blood cells), tumors, organs, and also samples of in vitro cell culture constituents.

[0047] The term “biological sources” as used herein refers to the sources from which the target polynucleotides are derived. The source can be of any form of “sample” as described above, including but not limited to, cell, tissue or fluid. “Different biological sources” can refer to different cells/tissues/organs of the same individual, or cells/tissues/organs from different individuals of the same species, or cells/tissues/organs from different species.

[0048] Cancer-associated Sequences

[0049] The CA sequences of the invention were initially identified by infection of mice with a retrovirus such as murine leukemia virus (MLV) resulting in lymphoma. Retroviruses have a genome that is made out of RNA. After a retrovirus infects a host cell, a double stranded DNA copy of the retrovirus genome (a “provirus”) is inserted into the genomic DNA of the host cell. The integrated provirus may affect the expression of host genes at or near the site of integration—a phenomenon known as retroviral insertional mutagenesis. Possible changes in the expression of host cell genes include: (i) increased expression of genes near the site of integration resulting from the proximity of elements in the provirus that act as transcriptional promoters and enhancers, (ii) functional inactivation of a gene caused by the integration of a provirus into the gene itself thus preventing the synthesis of a functional gene product, or (iii) expression of a mutated protein that has a different activity to the normal protein. Typically such a protein would be prematurely truncated and lack a regulatory domain near the C terminus. Such a protein might be constitutively active, or act as a dominant negative inhibitor of the normal protein. For example, retrovirus enhancers, including that of SL3-3, are known to act on genes up to approximately 200 kilobases from the insertion site. Moreover, many of these sequences are also involved in other cancers and disease states. Sequences of mouse genes according to this invention, that are identified in this manner are shown as mD U-001 through mD U-128 in Tables 1-13.

[0050] A CA sequence can be initially identified by substantial nucleic acid and/or amino acid sequence homology to the CA sequences outlined herein. Such homology can be based upon the overall nucleic acid or amino acid sequence, and is generally determined as outlined below, using either homology programs or hybridization conditions.

[0051] In one embodiment, CA sequences are those that are up-regulated in cancers; that is, the expression of these genes is higher in cancer tissue as compared to normal tissue of the same differentiation stage. “Up-regulation” as used herein means increased expression by about 50%, preferably about 100%, more preferably about 150% to about 200%, with up-regulation from 300% to 1000% being preferred.

[0052] In another embodiment, CA sequences are those that are down-regulated in cancers; that is, the expression of these genes is lower in cancer tissue as compared to normal tissue of the same differentiation stage. “Down-regulation” as used herein means decreased expression by about 50%, preferably about 100%, more preferably about 150% to about 200%, with down-regulation from 300% to 1000% to no expression being preferred.

[0053] In yet another embodiment, CA sequences are those that have altered sequences but show either the same or an altered expression profile as compared to normal lymphoid tissue of the same differentiation stage. “Altered CA sequences” as used herein also refers to sequences that are truncated, contain insertions or contain point mutations.

[0054] CA proteins of the present invention may be classified as secreted proteins, transmembrane proteins or intracellular proteins. In a preferred embodiment the CA protein is an intracellular protein. Intracellular proteins may be found in the cytoplasm and/or in the nucleus. Intracellular proteins are involved in all aspects of cellular function and replication (including, for example, signaling pathways); aberrant expression of such proteins results in unregulated or disregulated cellular processes. For example, many intracellular proteins have enzymatic activity such as protein kinase activity, protein phosphatase activity, protease activity, nucleotide cyclase activity, polymerase activity and the like. Intracellular proteins also serve as docking proteins that are involved in organizing complexes of proteins, or targeting proteins to various subcellular localizations, and are involved in maintaining the structural integrity of organelles.

[0055] An increasingly appreciated concept in characterizing intracellular proteins is the presence in the proteins of one or more motifs for which defined functions have been attributed. In addition to the highly conserved sequences found in the enzymatic domain of proteins, highly conserved sequences have been identified in proteins that are involved in protein-protein interaction. For example, Src-homology-2 (SH2) domains bind tyrosine-phosphorylated targets in a sequence dependent manner. PTB domains, which are distinct from SH2 domains, also bind tyrosine phosphorylated targets. SH3 domains bind to proline-rich targets. In addition, PH domains, tetratricopeptide repeats and WD domains to name only a few, have been shown to mediate protein-protein interactions. Some of these may also be involved in binding to phospholipids or other second messengers. As will be appreciated by one of ordinary skill in the art, these motifs can be identified on the basis of primary sequence; thus, an analysis of the sequence of proteins may provide insight into both the enzymatic potential of the molecule and/or molecules with which the protein may associate.

[0056] In a preferred embodiment, the CA sequences are transmembrane proteins. Transmembrane proteins are molecules that span the phospholipid bilayer of a cell. They may have an intracellular domain, an extracellular domain, or both. The intracellular domains of such proteins may have a number of functions including those already described for intracellular proteins. For example, the intracellular domain may have enzymatic activity and/or may serve as a binding site for additional proteins. Frequently the intracellular domain of transmembrane proteins serves both roles. For example certain receptor tyrosine kinases have both protein kinase activity and SH2 domains. In addition, autophosphorylation of tyrosines on the receptor molecule itself creates binding sites for additional SH2 domain containing proteins.

[0057] Transmembrane proteins may contain from one to many transmembrane domains. For example, receptor tyrosine kinases, certain cytokine receptors, receptor guanylyl cyclases and receptor serine/threonine protein kinases contain a single transmembrane domain. However, various other proteins including channels and adenylyl cyclases contain numerous transmembrane domains. Many important cell surface receptors are classified as “seven transmembrane domain” proteins, as they contain 7 membrane spanning regions. Important transmembrane protein receptors include, but are not limited to insulin receptor, insulin-like growth factor receptor, human growth hormone receptor, glucose transporters, transferrin receptor, epidermal growth factor receptor, low density lipoprotein receptor, leptin receptor, interleukin receptors, e.g. IL-1 receptor, IL-2 receptor, etc. CA proteins may be derived from genes that regulate apoptosis (IL-3, GM-CSF and Bc1-x) or are shown to have a role in the regulation of apoptosis.

[0058] Characteristics of transmembrane domains include approximately 20 consecutive hydrophobic amino acids that may be followed by charged amino acids. Therefore, upon analysis of the amino acid sequence of a particular protein, the localization and number of transmembrane domains within the protein may be predicted.

[0059] The extracellular domains of transmembrane proteins are diverse; however, conserved motifs are found repeatedly among various extracellular domains. Conserved structure and/or functions have been ascribed to different extracellular motifs. For example, cytokine receptors are characterized by a cluster of cysteines and a WSXWS (W=tryptophan, S=serine, X=any amino acid) motif. Immunoglobulin-like domains are highly conserved. Mucin-like domains may be involved in cell adhesion and leucine-rich repeats participate in protein-protein interactions.

[0060] Many extracellular domains are involved in binding to other molecules. In one aspect, extracellular domains are receptors. Factors that bind the receptor domain include circulating ligands, which may be peptides, proteins, or small molecules such as adenosine and the like. For example, growth factors such as EGF, FGF and PDGF are circulating growth factors that bind to their cognate receptors to initiate a variety of cellular responses. Other factors include cytokines, mitogenic factors, neurotrophic factors and the like. Extracellular domains also bind to cell-associated molecules. In this respect, they mediate cell-cell interactions. Cell-associated ligands can be tethered to the cell for example via a glycosylphosphatidylinositol (GPI) anchor, or may themselves be transmembrane proteins. Extracellular domains also associate with the extracellular matrix and contribute to the maintenance of the cell structure.

[0061] CA proteins that are transmembrane are particularly preferred in the present invention as they are good targets for immunotherapeutics, as are described herein. In addition, as outlined below, transmembrane proteins can be also useful in imaging modalities.

[0062] It will also be appreciated by those in the art that a transmembrane protein can be made soluble by removing transmembrane sequences, for example through recombinant methods. Furthermore, transmembrane proteins that have been made soluble can be made to be secreted through recombinant means by adding an appropriate signal sequence.

[0063] In a preferred embodiment, the CA proteins are secreted proteins; the secretion of which can be either constitutive or regulated. These proteins have a signal peptide or signal sequence that targets the molecule to the secretory pathway. Secreted proteins are involved in numerous physiological events; by virtue of their circulating nature, they serve to transmit signals to various other cell types. The secreted protein may function in an autocrine manner (acting on the cell that secreted the factor), a paracrine manner (acting on cells in close proximity to the cell that secreted the factor) or an endocrine manner (acting on cells at a distance). Thus secreted molecules find use in modulating or altering numerous aspects of physiology. CA proteins that are secreted proteins are particularly preferred in the present invention as they serve as good targets for diagnostic markers, for example for blood tests.

[0064] CA Sequences and Homologs

[0065] A CA sequence is initially identified by substantial nucleic acid and/or amino acid sequence homology to the CA sequences outlined herein. Such homology can be based upon the overall nucleic acid or amino acid sequence, and is generally determined as outlined below, using either homology programs or hybridization conditions.

[0066] As used herein, a nucleic acid is a “CA nucleic acid” if the overall homology of the nucleic acid sequence to one of the nucleic acids of Tables 1-13 is preferably greater than about 75%, more preferably greater than about 80%, even more preferably greater than about 85% and most preferably greater than 90%. In some embodiments the homology will be as high as about 93 to 95 or 98%. In a preferred embodiment, the sequences that are used to determine sequence identity or similarity are selected from those of the nucleic acids of Tables 1-13. In another embodiment, the sequences are naturally occurring allelic variants of the sequences of the nucleic acids of Tables 1-13. In another embodiment, the sequences are sequence variants as further described herein.

[0067] Homology in this context means sequence similarity or identity, with identity being preferred. A preferred comparison for homology purposes is to compare the sequence containing sequencing errors to the correct sequence. This homology will be determined using standard techniques known in the art, including, but not limited to, the local homology algorithm of Smith & Waterman, Adv. Appl. Math. 2:482 (1981), by the homology alignment algorithm of Needleman & Wunsch, J. Mol. Biol. 48:443 (1970), by the search for similarity method of Pearson & Lipman, PNAS USA 85:2444 (1988), by computerized implementations of these algorithms (GAP, BESTFIT, FASTA, and TFASTA in the Wisconsin Genetics Software Package, Genetics Computer Group, 575 Science Drive, Madison, Wis.), the Best Fit sequence program described by Devereux et al., Nucl. Acid Res. 12:387-395 (1984), preferably using the default settings, or by inspection.

[0068] One example of a useful algorithm is PILEUP. PILEUP creates a multiple sequence alignment from a group of related sequences using progressive, pairwise alignments. It can also plot a tree showing the clustering relationships used to create the alignment. PILEUP uses a simplification of the progressive alignment method of Feng & Doolittle, J. Mol. Evol. 35:351-360 (1987); the method is similar to that described by Higgins & Sharp CABIOS 5:151-153 (1989). Useful PILEUP parameters include a default gap weight of 3.00, a default gap length weight of 0.10, and weighted end gaps.

[0069] Another example of a useful algorithm is the BLAST (Basic Local Alignment Search Tool) algorithm, described in Altschul et al., J. Mol. Biol. 215, 403-410, (1990) and Karlin et al., PNAS USA 90:5873-5787 (1993). A particularly useful BLAST program is the WU-BLAST-2 program which was obtained from Altschul et al., Methods in Enzymology, 266: 460-480 (1996); http://blast.wustl.edu/]. WU-BLAST-2 uses several search parameters, most of which are set to the default values. The adjustable parameters are set with the following values: overlap span=1, overlap fraction=0.125, word threshold (T)=11. The HSP S and HSP S2 parameters are dynamic values and are established by the program itself depending upon the composition of the particular sequence and composition of the particular database against which the sequence of interest is being searched; however, the values may be adjusted to increase sensitivity. A percent amino acid sequence identity value is determined by the number of matching identical residues divided by the total number of residues of the “longer” sequence in the aligned region. The “longer” sequence is the one having the most actual residues in the aligned region (gaps introduced by WU-Blast-2 to maximize the alignment score are ignored).

[0070] Thus, “percent (%) nucleic acid sequence identity” is defined as the percentage of nucleotide residues in a candidate sequence that are identical with the nucleotide residues of the nucleic acids of Tables 1-13. A preferred method utilizes the BLASTN module of WU-BLAST-2 set to the default parameters, with overlap span and overlap fraction set to 1 and 0.125, respectively.

[0071] The alignment may include the introduction of gaps in the sequences to be aligned. In addition, for sequences which contain either more or fewer nucleotides than those of the nucleic acids of Tables 1-13, it is understood that the percentage of homology will be determined based on the number of homologous nucleosides in relation to the total number of nucleosides. Thus homology of sequences shorter than those of the sequences identified herein will be determined using the number of nucleosides in the shorter sequence.

[0072] In another embodiment of the invention, polynucleotide compositions are provided that are capable of hybridizing under moderate to high stringency conditions to a polynucleotide sequence provided herein, or a fragment thereof, or a complementary sequence thereof. Hybridization techniques are well known in the art of molecular biology. For purposes of illustration, suitable moderately stringent conditions for testing the hybridization of a polynucleotide of this invention with other polynucleotides include prewashing in a solution of 5×SSC (“saline sodium citrate”; 9 mM NaCl, 0.9 mM sodium citrate), 0.5% SDS, 1.0 mM EDTA (pH 8.0); hybridizing at 50-60° C., 5×SSC, overnight; followed by washing twice at 65° C. for 20 minutes with each of 2×, 0.5× and 0.2×SSC containing 0.1% SDS. One skilled in the art will understand that the stringency of hybridization can be readily manipulated, such as by altering the salt content of the hybridization solution and/or the temperature at which the hybridization is performed. For example, in another embodiment, suitable highly stringent hybridization conditions include those described above, with the exception that the temperature of hybridization is increased, e.g., to 60-65° C., or 65-70° C. Stringent conditions may also be achieved with the addition of destabilizing agents such as formamide.

[0073] Thus nucleic acids that hybridize under high stringency to the nucleic acids identified in the figures, or their complements, are considered CA sequences. High stringency conditions are known in the art; see for example Maniatis et al., Molecular Cloning: A Laboratory Manual, 2d Edition, 1989, and Short Protocols in Molecular Biology, ed. Ausubel, et al., both of which are hereby incorporated by reference. Stringent conditions are sequence-dependent and will be different in different circumstances. Longer sequences hybridize specifically at higher temperatures. An extensive guide to the hybridization of nucleic acids is found in Tijssen, Techniques in Biochemistry and Molecular Biology—Hybridization with Nucleic Acid Probes, “Overview of principles of hybridization and the strategy of nucleic acid assays” (1993). Generally, stringent conditions are selected to be about 5-10° C. lower than the thermal melting point (Tₘ) for the specific sequence at a defined ionic strength pH. The Tₘ is the temperature (under defined ionic strength, pH and nucleic acid concentration) at which 50% of the probes complementary to the target hybridize to the target sequence at equilibrium (as the target sequences are present in excess, at Tₘ, 50% of the probes are occupied at equilibrium). Stringent conditions will be those in which the salt concentration is less than about 1.0 M sodium ion, typically about 0.01 to 1.0 M sodium ion concentration (or other salts) at pH 7.0 to 8.3 and the temperature is at least about 30° C. for short probes (e.g. 10 to 50 nucleotides) and at least about 60° C. for longer probes (e.g. greater than 50 nucleotides). In another embodiment, less stringent hybridization conditions are used; for example, moderate or low stringency conditions may be used, as are known in the art; see Maniatis and Ausubel, supra, and Tijssen, supra.

[0074] In addition, the CA nucleic acid sequences of the invention are fragments of larger genes, i.e. they are nucleic acid segments. Alternatively, the CA nucleic acid sequences can serve as indicators of oncogene position, for example, the CA sequence may be an enhancer that activates a protooncogene. “Genes” in this context includes coding regions, non-coding regions, and mixtures of coding and non-coding regions. Accordingly, as will be appreciated by those in the art, using the sequences provided herein, additional sequences of the CA genes can be obtained, using techniques well known in the art for cloning either longer sequences or the full-length sequences; see Maniatis et al., and Ausubel, et al., supra, hereby expressly incorporated by reference. In general, this is done using PCR, for example, kinetic PCR.

[0075] Detection of CA Expression

[0076] Once the CA nucleic acid is identified, it can be cloned and, if necessary, its constituent parts recombined to form the entire CA nucleic acid. Once isolated from its natural source, e.g., contained within a plasmid or other vector or excised therefrom as a linear nucleic acid segment, the recombinant CA nucleic acid can be further used as a probe to identify and isolate other CA nucleic acids, for example additional coding regions. It can also be used as a “precursor” nucleic acid to make modified or variant CA nucleic acids and proteins. In a preferred embodiment, once a CA gene is identified its nucleotide sequence is used to design probes specific for the CA gene.

[0077] The CA nucleic acids of the present invention are used in several ways. In a first embodiment, nucleic acid probes hybridizable to CA nucleic acids are made and attached to biochips to be used in screening and diagnostic methods, or for gene therapy and/or antisense applications. Alternatively, the CA nucleic acids that include coding regions of CA proteins can be put into expression vectors for the expression of CA proteins, again either for screening purposes or for administration to a patient.

[0078] Recent developments in DNA microarray technology make it possible to conduct a large scale assay of a plurality of target CA nucleic acid molecules on a single solid phase support. U.S. Pat. No. 5,837,832 (Chee et al.) and related patent applications describe immobilizing an array of oligonucleotide probes for hybridization and detection of specific nucleic acid sequences in a sample. Target polynucleotides of interest isolated from a tissue of interest are hybridized to the DNA chip and the specific sequences detected based on the target polynucleotides' preference and degree of hybridization at discrete probe locations. One important use of arrays is in the analysis of differential gene expression, where the profile of expression of genes in different cells, often a cell of interest and a control cell, is compared and any differences in gene expression among the respective cells are identified. Such information is useful for the identification of the types of genes expressed in a particular cell or tissue type and diagnosis of cancer conditions based on the expression profile.

[0079] Typically, RNA from the sample of interest is subjected to reverse transcription to obtain labeled cDNA. See U.S. Pat. No. 6,410,229 (Lockhart et al) The cDNA is then hybridized to oligonucleotides or cDNAs of known sequence arrayed on a chip or other surface in a known order. The location of the oligonucleotide to which the labeled cDNA hybridizes provides sequence information on the cDNA, while the amount of labeled hybridized RNA or cDNA provides an estimate of the relative representation of the RNA or cDNA of interest. See Schena, et al. Science 270:467-470 (1995). For example, use of a cDNA microarray to analyze gene expression patterns in human cancer is described by DeRisi, et al. (Nature Genetics 14:457-460 (1996)).

[0080] In a preferred embodiment, nucleic acid probes corresponding to CA nucleic acids (both the nucleic acid sequences outlined in the figures and/or the complements thereof) are made. Typically, these probes are synthesized based on the disclosed sequences of this invention. The nucleic acid probes attached to the biochip are designed to be substantially complementary to the CA nucleic acids, i.e. the target sequence (either the target sequence of the sample or to other probe sequences, for example in sandwich assays), such that specific hybridization of the target sequence and the probes of the present invention occurs. As outlined below, this complementarity need not be perfect, in that there may be any number of base pair mismatches that will interfere with hybridization between the target sequence and the single stranded nucleic acids of the present invention. It is expected that the overall homology of the genes at the nucleotide level probably will be about 40% or greater, probably about 60% or greater, and even more probably about 80% or greater; and in addition that there will be corresponding contiguous sequences of about 8-12 nucleotides or longer. However, if the number of mutations is so great that no hybridization can occur under even the least stringent of hybridization conditions, the sequence is not a complementary target sequence. Thus, by “substantially complementary” herein is meant that the probes are sufficiently complementary to the target sequences to hybridize under normal reaction conditions, particularly high stringency conditions, as outlined herein. Whether or not a sequence is unique to a CA gene according to this invention can be determined by techniques known to those of skill in the art. For example, the sequence can be compared to sequences in databanks, e.g., GeneBank, to determine whether it is present in the uninfected host or other organisms. The sequence can also be compared to the known sequences of other viral agents, including those that are known to induce cancer.

[0081] A nucleic acid probe is generally single stranded but can be partly single and partly double stranded. The strandedness of the probe is dictated by the structure, composition, and properties of the target sequence. In general, the oligonucleotide probes range from about 6, 8, 10, 12, 15, 20, 30 to about 100 bases long, with from about 10 to about 80 bases being preferred, and from about 30 to about 50 bases being particularly preferred. That is, generally entire genes are rarely used as probes. In some embodiments, much longer nucleic acids can be used, up to hundreds of bases. The probes are sufficiently specific to hybridize to complementary template sequence under conditions known by those of skill in the art. The number of mismatches between the probes sequences and their complementary template (target) sequences to which they hybridize during hybridization generally do not exceed 15%, usually do not exceed 10% and preferably do not exceed 5%, as determined by FASTA (default settings).

[0082] Oligonucleotide probes can include the naturally-occurring heterocyclic bases normally found in nucleic acids (uracil, cytosine, thymine, adenine and guanine), as well as modified bases and base analogues. Any modified base or base analogue compatible with hybridization of the probe to a target sequence is useful in the practice of the invention. The sugar or glycoside portion of the probe can comprise deoxyribose, ribose, and/or modified forms of these sugars, such as, for example, 2′-O-alkyl ribose. In a preferred embodiment, the sugar moiety is 2′-deoxyribose; however, any sugar moiety that is compatible with the ability of the probe to hybridize to a target sequence can be used.

[0083] In one embodiment, the nucleoside units of the probe are linked by a phosphodiester backbone, as is well known in the art. In additional embodiments, internucleotide linkages can include any linkage known to one of skill in the art that is compatible with specific hybridization of the probe including, but not limited to phosphorothioate, methylphosphonate, sulfamate (e.g., U.S. Pat. No. 5,470,967) and polyamide (i.e., peptide nucleic acids). Peptide nucleic acids are described in Nielsen et al. (1991) Science 254: 1497-1500, U.S. Pat. No. 5,714,331, and Nielsen (1999) Curr. Opin. Biotechnol. 10:71-75.

[0084] In certain embodiments, the probe can be a chimeric molecule; i.e., can comprise more than one type of base or sugar subunit, and/or the linkages can be of more than one type within the same primer. The probe can comprise a moiety to facilitate hybridization to its target sequence, as are known in the art, for example, intercalators and/or minor groove binders. Variations of the bases, sugars, and internucleoside backbone, as well as the presence of any pendant group on the probe, will be compatible with the ability of the probe to bind, in a sequence-specific fashion, with its target sequence. A large number of structural modifications, both known and to be developed, are possible within these bounds. Advantageously, the probes according to the present invention may have structural characteristics such that they allow the signal amplification, such structural characteristics being, for example, branched DNA probes as those described by Urdea et al. (Nucleic Acids Symp. Ser., 24:197-200 (1991)) or in the European Patent No. EP-0225,807. Moreover, synthetic methods for preparing the various heterocyclic bases, sugars, nucleosides and nucleotides that form the probe, and preparation of oligonucleotides of specific predetermined sequence, are well-developed and known in the art. A preferred method for oligonucleotide synthesis incorporates the teaching of U.S. Pat. No. 5,419,966.

[0085] Multiple probes may be designed for a particular target nucleic acid to account for polymorphism and/or secondary structure in the target nucleic acid, redundancy of data and the like. In some embodiments, where more than one probe per sequence is used, either overlapping probes or probes to different sections of a single target CA gene are used. That is, two, three, four or more probes, with three being preferred, are used to build in a redundancy for a particular target. The probes can be overlapping (i.e. have some sequence in common), or specific for distinct sequences of a CA gene. When multiple target polynucleotides are to be detected according to the present invention, each probe or probe group corresponding to a particular target polynucleotide is situated in a discrete area of the microarray.

[0086] Probes may be in solution, such as in wells or on the surface of a micro-array, or attached to a solid support. Examples of solid support materials that can be used include a plastic, a ceramic, a metal, a resin, a gel and a membrane. Useful types of solid supports include plates, beads, magnetic material, microbeads, hybridization chips, membranes, crystals, ceramics and self-assembling monolayers. A preferred embodiment comprises a two-dimensional or three-dimensional matrix, such as a gel or hybridization chip with multiple probe binding sites (Pevzner et al., J. Biomol. Struc. & Dyn. 9:399-410, 1991; Maskos and Southern, Nuc. Acids Res. 20:1679-84, 1992). Hybridization chips can be used to construct very large probe arrays that are subsequently hybridized with a target nucleic acid. Analysis of the hybridization pattern of the chip can assist in the identification of the target nucleotide sequence. Patterns can be manually or computer analyzed, but it is clear that positional sequencing by hybridization lends itself to computer analysis and automation. Algorithms and software, which have been developed for sequence reconstruction, are applicable to the methods described herein (R. Drmanac et al., J. Biomol. Struc. & Dyn. 5:1085-1102, 1991; P. A. Pevzner, J. Biomol. Struc. & Dyn. 7:63-73, 1989).

[0087] As will be appreciated by those in the art, nucleic acids can be attached or immobilized to a solid support in a wide variety of ways. By “immobilized” herein is meant the association or binding between the nucleic acid probe and the solid support is sufficient to be stable under the conditions of binding, washing, analysis, and removal as outlined below. The binding can be covalent or non-covalent. By “non-covalent binding” and grammatical equivalents herein is meant one or more of either electrostatic, hydrophilic, and hydrophobic interactions. Included in non-covalent binding is the covalent attachment of a molecule, such as streptavidin, to the support and the non-covalent binding of the biotinylated probe to the streptavidin. By “covalent binding” and grammatical equivalents herein is meant that the two moieties, the solid support and the probe, are attached by at least one bond, including sigma bonds, pi bonds and coordination bonds. Covalent bonds can be formed directly between the probe and the solid support or can be formed by a cross linker or by inclusion of a specific reactive group on either the solid support or the probe or both molecules. Immobilization may also involve a combination of covalent and non-covalent interactions.

[0088] Nucleic acid probes may be attached to the solid support by covalent binding such as by conjugation with a coupling agent or by, covalent or non-covalent binding such as electrostatic interactions, hydrogen bonds or antibody-antigen coupling, or by combinations thereof. Typical coupling agents include biotin/avidin, biotin/streptavidin, Staphylococcus aureus protein A/IgG antibody F_{c} fragment, and streptavidin/protein A chimeras (T. Sano and C. R. Cantor, Bio/Technology 9:1378-81 (1991)), or derivatives or combinations of these agents. Nucleic acids may be attached to the solid support by a photocleavable bond, an electrostatic bond, a disulfide bond, a peptide bond, a diester bond or a combination of these sorts of bonds. The array may also be attached to the solid support by a selectively releasable bond such as 4,4′-dimethoxytrityl or its derivative. Derivatives which have been found to be useful include 3 or 4 [bis-(4-methoxyphenyl)]-methyl-benzoic acid, N-succinimidyl-3 or 4 [bis-(4-methoxyphenyl)]-methyl-benzoic acid, N-succinimidyl-3 or 4 [bis-(4-methoxyphenyl)]-hydroxymethyl-benzoic acid, N-succinimidyl-3 or 4 [bis-(4-methoxyphenyl)]-chloromethyl-benzoic acid, and salts of these acids.

[0089] In general, the probes are attached to the biochip in a wide variety of ways, as will be appreciated by those in the art. As described herein, the nucleic acids can either be synthesized first, with subsequent attachment to the biochip, or can be directly synthesized on the biochip.

[0090] The biochip comprises a suitable solid substrate. By “substrate” or “solid support” or other grammatical equivalents herein is meant any material that can be modified to contain discrete individual sites appropriate for the attachment or association of the nucleic acid probes and is amenable to at least one detection method. The solid phase support of the present invention can be of any solid materials and structures suitable for supporting nucleotide hybridization and synthesis. Preferably, the solid phase support comprises at least one substantially rigid surface on which the primers can be immobilized and the reverse transcriptase reaction performed. The substrates with which the polynucleotide microarray elements are stably associated may be fabricated from a variety of materials, including plastics, ceramics, metals, acrylamide, cellulose, nitrocellulose, glass, polystyrene, polyethylene vinyl acetate, polypropylene, polymethacrylate, polyethylene, polyethylene oxide, polysilicates, polycarbonates, Teflon®, fluorocarbons, nylon, silicon rubber, polyanhydrides, polyglycolic acid, polylactic acid, polyorthoesters, polypropylfumerate, collagen, glycosaminoglycans, and polyamino acids. Substrates may be two-dimensional or three-dimensional in form, such as gels, membranes, thin films, glasses, plates, cylinders, beads, magnetic beads, optical fibers, woven fibers, etc. A preferred form of array is a three-dimensional array. A preferred three-dimensional array is a collection of tagged beads. Each tagged bead has different primers attached to it. Tags are detectable by signaling means such as color (Luminex, Illumina) and electromagnetic field (Pharmaseq) and signals on tagged beads can even be remotely detected (e.g., using optical fibers). The size of the solid support can be any of the standard microarray sizes, useful for DNA microarray technology, and the size may be tailored to fit the particular machine being used to conduct a reaction of the invention. In general, the substrates allow optical detection and do not appreciably fluoresce.

[0091] In a preferred embodiment, the surface of the biochip and the probe may be derivatized with chemical functional groups for subsequent attachment of the two. Thus, for example, the biochip is derivatized with a chemical functional group including, but not limited to, amino groups, carboxy groups, oxo groups and thiol groups, with amino groups being particularly preferred. Using these functional groups, the probes can be attached using functional groups on the probes. For example, nucleic acids containing amino groups can be attached to surfaces comprising amino groups, for example using linkers as are known in the art; for example, homo-or hetero-bifunctional linkers as are well known (see 1994 Pierce Chemical Company catalog, technical section on cross-linkers, pages 155-200, incorporated herein by reference). In addition, in some cases, additional linkers, such as alkyl groups (including substituted and heteroalkyl groups) may be used.

[0092] In this embodiment, the oligonucleotides are synthesized as is known in the art, and then attached to the surface of the solid support. As will be appreciated by those skilled in the art, either the 5′ or 3′ terminus may be attached to the solid support, or attachment may be via an internal nucleoside. In an additional embodiment, the immobilization to the solid support may be very strong, yet non-covalent. For example, biotinylated oligonucleotides can be made, which bind to surfaces covalently coated with streptavidin, resulting in attachment.

[0093] The arrays may be produced according to any convenient methodology, such as preforming the polynucleotide microarray elements and then stably associating them with the surface. Alternatively, the oligonucleotides may be synthesized on the surface, as is known in the art. A number of different array configurations and methods for their production are known to those of skill in the art and disclosed in WO 95/25116 and WO 95/35505 (photolithographic techniques), U.S. Pat. No. 5,445,934 (in situ synthesis by photolithography), U.S. Pat. No. 5,384,261 (in situ synthesis by mechanically directed flow paths); and U.S. Pat. No. 5,700,637 (synthesis by spotting, printing or coupling); the disclosure of which are herein incorporated in their entirety by reference. Another method for coupling DNA to beads uses specific ligands attached to the end of the DNA to link to ligand-binding molecules attached to a bead. Possible ligand-binding partner pairs include biotin-avidin/streptavidin, or various antibody/antigen pairs such as digoxygenin-antidigoxygenin antibody (Smith et al., “Direct Mechanical Measurements of the Elasticity of Single DNA Molecules by Using Magnetic Beads,” Science 258:1122-1126 (1992)). Covalent chemical attachment of DNA to the support can be accomplished by using standard coupling agents to link the 5′-phosphate on the DNA to coated microspheres through a phosphoamidate bond. Methods for immobilization of oligonucleotides to solid-state substrates are well established. See Pease et al., Proc. Natl. Acad. Sci. USA 91(11):5022-5026 (1994). A preferred method of attaching oligonucleotides to solid-state substrates is described by Guo et al., Nucleic Acids Res. 22:5456-5465 (1994). Immobilization can be accomplished either by in situ DNA synthesis (Maskos and Southern, Nucleic Acids Research, 20:1679-1684 (1992) or by covalent attachment of chemically synthesized oligonucleotides (Guo et al., supra) in combination with robotic arraying technologies.

[0094] In addition to the solid-phase technology represented by biochip arrays, gene expression can also be quantified using liquid-phase arrays. One such system is kinetic polymerase chain reaction (PCR). Kinetic PCR allows for the simultaneous amplification and quantification of specific nucleic acid sequences. The specificity is derived from synthetic oligonucleotide primers designed to preferentially adhere to single-stranded nucleic acid sequences bracketing the target site. This pair of oligonucleotide primers form specific, non-covalently bound complexes on each strand of the target sequence. These complexes facilitate in vitro transcription of double-stranded DNA in opposite orientations. Temperature cycling of the reaction mixture creates a continuous cycle, of primer binding, transcription, and re-melting of the nucleic acid to individual strands. The result is an exponential increase of the target dsDNA product. This product can be quantified in real time either through the use of an intercalating dye or a sequence specific probe. SYBR® Greene I, is an example of an intercalating dye, that preferentially binds to dsDNA resulting in a concomitant increase in the fluorescent signal. Sequence specific probes, such as used with TaqMan® technology, consist of a fluorochrome and a quenching molecule covalently bound to opposite ends of an oligonucleotide. The probe is designed to selectively bind the target DNA sequence between the two primers. When the DNA strands are synthesized during the PCR reaction, the fluorochrome is cleaved from the probe by the exonuclease activity of the polymerase resulting in signal dequenching. The probe signaling method can be more specific than the intercalating dye method, but in each case, signal strength is proportional to the dsDNA product produced. Each type of quantification method can be used in multi-well liquid phase arrays with each well representing primers and/or probes specific to nucleic acid sequences of interest. When used with messenger RNA preparations of tissues or cell lines, an array of probe/primer reactions can simultaneously quantify the expression of multiple gene products of interest. See Germer, S., et al., Genome Res. 10:258-266 (2000); Heid, C. A., et al., Genome Res. 6, 986-994 (1996).

[0095] Expression of CA Proteins

[0096] In a preferred embodiment, CA nucleic acids encoding CA proteins are used to make a variety of expression vectors to express CA proteins which can then be used in screening assays, as described below. The expression vectors may be either self-replicating extrachromosomal vectors or vectors which integrate into a host genome. Generally, these expression vectors include transcriptional and translational regulatory nucleic acid operably linked to the nucleic acid encoding the CA protein. The term “control sequences” refers to DNA sequences necessary for the expression of an operably linked coding sequence in a particular host organism. The control sequences that are suitable for prokaryotes, for example, include a promoter, optionally an operator sequence, and a ribosome binding site. Eukaryotic cells are known to utilize promoters, polyadenylation signals, and enhancers.

[0097] Nucleic acid is “operably linked” when it is placed into a functional relationship with another nucleic acid sequence. For example, DNA for a presequence or secretory leader is operably linked to DNA for a polypeptide if it is expressed as a preprotein that participates in the secretion of the polypeptide; a promoter or enhancer is operably linked to a coding sequence if it affects the transcription of the sequence; or a ribosome binding site is operably linked to a coding sequence if it is positioned so as to facilitate translation. Generally, “operably linked” means that the DNA sequences being linked are contiguous, and, in the case of a secretory leader, contiguous and in reading phase. However, enhancers do not have to be contiguous. Linking is accomplished by ligation at convenient restriction sites. If such sites do not exist, synthetic oligonucleotide adaptors or linkers are used in accordance with conventional practice. The transcriptional and translational regulatory nucleic acid will generally be appropriate to the host cell used to express the CA protein; for example, transcriptional and translational regulatory nucleic acid sequences from Bacillus are preferably used to express the CA protein in Bacillus. Numerous types of appropriate expression vectors, and suitable regulatory sequences are known in the art for a variety of host cells.

[0098] In general, the transcriptional and translational regulatory sequences may include, but are not limited to, promoter sequences, ribosomal binding sites, transcriptional start and stop sequences, translational start and stop sequences, and enhancer or activator sequences. In a preferred embodiment, the regulatory sequences include a promoter and transcriptional start and stop sequences.

[0099] Promoter sequences encode either constitutive or inducible promoters. The promoters may be either naturally occurring promoters or hybrid promoters. Hybrid promoters, which combine elements of more than one promoter, are also known in the art, and are useful in the present invention.

[0100] In addition, the expression vector may comprise additional elements. For example, the expression vector may have two replication systems, thus allowing it to be maintained in two organisms, for example in mammalian or insect cells for expression and in a prokaryotic host for cloning and amplification. Furthermore, for integrating expression vectors, the expression vector contains at least one sequence homologous to the host cell genome, and preferably two homologous sequences that flank the expression construct. The integrating vector may be directed to a specific locus in the host cell by selecting the appropriate homologous sequence for inclusion in the vector. Constructs for integrating vectors are well known in the art.

[0101] In addition, in a preferred embodiment, the expression vector contains a selectable marker gene to allow the selection of transformed host cells. Selection genes are well known in the art and will vary with the host cell used.

[0102] The CA proteins of the present invention are produced by culturing a host cell transformed with an expression vector containing nucleic acid encoding a CA protein, under the appropriate conditions to induce or cause expression of the CA protein. The conditions appropriate for CA protein expression will vary with the choice of the expression vector and the host cell, and will be easily ascertained by one skilled in the art through routine experimentation. For example, the use of constitutive promoters in the expression vector will require optimizing the growth and proliferation of the host cell, while the use of an inducible promoter requires the appropriate growth conditions for induction. In addition, in some embodiments, the timing of the harvest is important. For example, the baculoviral systems used in insect cell expression are lytic viruses, and thus harvest time selection can be crucial for product yield.

[0103] Appropriate host cells include yeast, bacteria, archaebacteria, fungi, and insect, plant and animal cells, including mammalian cells. Of particular interest are Drosophila melanogaster cells, Saccharomyces cerevisiae and other yeasts, E. coli, Bacillus subtilis, Sf9 cells, C129 cells, 293 cells, Neurospora, BHK, CHO, COS, HeLa cells, THP1 cell line (a macrophage cell line) and human cells and cell lines.

[0104] In a preferred embodiment, the CA proteins are expressed in mammalian cells. Mammalian expression systems are also known in the art, and include retroviral systems. A preferred expression vector system is a retroviral vector system such as is generally described in PCT/US97/01019 and PCT/US97/01048, both of which are hereby expressly incorporated by reference. Of particular use as mammalian promoters are the promoters from mammalian viral genes, since the viral genes are often highly expressed and have a broad host range. Examples include the SV40 early promoter, mouse mammary tumor virus LTR promoter, adenovirus major late promoter, herpes simplex virus promoter, and the CMV promoter. Typically, transcription termination and polyadenylation sequences recognized by mammalian cells are regulatory regions located 3′ to the translation stop codon and thus, together with the promoter elements, flank the coding sequence. Examples of transcription terminator and polyadenylation signals include those derived form SV40.

[0105] The methods of introducing exogenous nucleic acid into mammalian hosts, as well as other hosts, are well known in the art, and will vary with the host cell used. Techniques include dextran-mediated transfection, calcium phosphate precipitation, polybrene mediated transfection, protoplast fusion, electroporation, viral infection, encapsulation of the polynucleotide(s) in liposomes, and direct microinjection of the DNA into nuclei.

[0106] In a preferred embodiment, CA proteins are expressed in bacterial systems. Bacterial expression systems are well known in the art. Promoters from bacteriophage may also be used and are known in the art. In addition, synthetic promoters and hybrid promoters are also useful; for example, the tac promoter is a hybrid of the trp and lac promoter sequences. Furthermore, a bacterial promoter can include naturally occurring promoters of non-bacterial origin that have the ability to bind bacterial RNA polymerase and initiate transcription. In addition to a functioning promoter sequence, an efficient ribosome binding site is desirable. The expression vector may also include a signal peptide sequence that provides for secretion of the CA protein in bacteria. The protein is either secreted into the growth media (gram-positive bacteria) or into the periplasmic space, located between the inner and outer membrane of the cell (gram-negative bacteria). The bacterial expression vector may also include a selectable marker gene to allow for the selection of bacterial strains that have been transformed. Suitable selection genes include genes that render the bacteria resistant to drugs such as ampicillin, chloramphenicol, erythromycin, kanamycin, neomycin and tetracycline. Selectable markers also include biosynthetic genes, such as those in the histidine, tryptophan and leucine biosynthetic pathways. These components are assembled into expression vectors. Expression vectors for bacteria are well known in the art, and include vectors for Bacillus subtilis, E. coli, Streptococcus cremoris, and Streptococcus lividans, among others. The bacterial expression vectors are transformed into bacterial host cells using techniques well known in the art, such as calcium chloride treatment, electroporation, and others.

[0107] In one embodiment, CA proteins are produced in insect cells. Expression vectors for the transformation of insect cells, and in particular, baculovirus-based expression vectors, are well known in the art.

[0108] In a preferred embodiment, CA protein is produced in yeast cells. Yeast expression systems are well known in the art, and include expression vectors for Saccharomyces cerevisiae, Candida albicans and C. maltosa, Hansenula polymorpha, Kluyveromyces fragilis and K lactis, Pichia guillerimondii and P. pastoris, Schizosaccharomyces pombe, and Yarrowia lipolytica.

[0109] The CA protein may also be made as a fusion protein, using techniques well known in the art. Thus, for example, for the creation of monoclonal antibodies. If the desired epitope is small, the CA protein may be fused to a carrier protein to form an immunogen. Alternatively, the CA protein may be made as a fusion protein to increase expression, or for other reasons. For example, when the CA protein is a CA peptide, the nucleic acid encoding the peptide may be linked to other nucleic acid for expression purposes.

[0110] In one embodiment, the CA nucleic acids, proteins and antibodies of the invention are labeled. By “labeled” herein is meant that a compound has at least one element, isotope or chemical compound attached to enable the detection of the compound. In general, labels fall into three classes: a) isotopic labels, which may be radioactive or heavy isotopes; b) immune labels, which may be antibodies or antigens; and c) colored or fluorescent dyes. The labels may be incorporated into the CA nucleic acids, proteins and antibodies at any position. For example, the label should be capable of producing, either directly or indirectly, a detectable signal. The detectable moiety may be a radioisotope, such as ³H, ¹⁴C, ³²P, ³⁵S, or ¹²⁵I, a fluorescent or chemiluminescent compound, such as fluorescein isothiocyanate, rhodamine, or luciferin, or an enzyme, such as alkaline phosphatase, beta-galactosidase or horseradish peroxidase. Any method known in the art for conjugating the antibody to the label may be employed, including those methods described by Hunter et al., Nature, 144:945 (1962); David et al., Biochemistry, 13:1014 (1974); Pain et al., J. Immunol. Meth., 40:219 (1981); and Nygren, J. Histochem. and Cytochem., 30:407 (1982).

[0111] Accordingly, the present invention also provides CA protein sequences. A CA protein of the present invention may be identified in several ways. “Protein” in this sense includes proteins, polypeptides, and peptides. As will be appreciated by those in the art, the nucleic acid sequences of the invention can be used to generate protein sequences. There are a variety of ways to do this, including cloning the entire gene and verifying its frame and amino acid sequence, or by comparing it to known sequences to search for homology to provide a frame, assuming the CA protein has homology to some protein in the database being used. Generally, the nucleic acid sequences are input into a program that will search all three frames for homology. This is done in a preferred embodiment using the following NCBI Advanced BLAST parameters. The program is blastx or blastn. The database is nr. The input data is as “Sequence in FASTA format”. The organism list is “none”. The “expect” is 10; the filter is default. The “descriptions” is 500, the “alignments” is 500, and the “alignment view” is pairwise. The “query Genetic Codes” is standard (1). The matrix is BLOSUM 62; gap existence cost is 11, per residue gap cost is 1; and the lambda ratio is 0.85 default. This results in the generation of a putative protein sequence.

[0112] In general, the term “polypeptide” as used herein refers to both the full-length polypeptide encoded by the recited polynucleotide, the polypeptide encoded by the gene represented by the recited polynucleotide, as well as portions or fragments thereof. The present invention encompasses variants of the naturally occurring proteins, wherein such variants are homologous or substantially similar to the naturally occurring protein, and can be of an origin of the same or different species as the naturally occurring protein (e.g., human, murine, or some other species that naturally expresses the recited polypeptide, usually a mammalian species). In general, variant polypeptides have a sequence that has at least about 80%, at least about 81%, at least about 82%, at least about 83%, at least about 84%, at least about 85%, at least about 86%, at least about 87%, at least about 88%, at least about 89%, usually at least about 90%, at least 91%, at least 92%, at least 93%, at least 94%, at least 95%, at least 96%, at least 97%, at least 98% and more usually at least about 99% sequence identity with a differentially expressed polypeptide described herein, as determined by the Smith-Waterman homology search algorithm using an affine gap search with a gap open penalty of 12 and a gap extension penalty of 2, BLOSUM matrix of 62. The Smith-Waterman homology search algorithm is taught in Smith and Waterman, Adv. Appl. Math. (1981) 2: 482-489. The variant polypeptides can be naturally or non-naturally glycosylated, i.e., the polypeptide has a glycosylation pattern that differs from the glycosylation pattern found in the corresponding naturally occurring protein.

[0113] Also within the scope of the invention are variants. Variants of polypeptides include mutants, fragments, and fusions. Mutants can include amino acid substitutions, additions or deletions. The amino acid substitutions can be conservative amino acid substitutions or substitutions to eliminate non-essential amino acids, such as to alter a glycosylation site, a phosphorylation site or an acetylation site, or to minimize misfolding by substitution or deletion of one or more cysteine residues that are not necessary for function. Conservative amino acid substitutions are those that preserve the general charge, hydrophobicity/hydrophilicity, and/or steric bulk of the amino acid substituted. Variants can be designed so as to retain or have enhanced biological activity of a particular region of the protein (e.g., a functional domain and/or, where the polypeptide is a member of a protein family, a region associated with a consensus sequence). Selection of amino acid alterations for production of variants can be based upon the accessibility (interior vs. exterior) of the amino acid (see, e.g., Go et al, Int. J. Peptide Protein Res. (1980) 15:211), the thermostability of the variant polypeptide (see, e.g., Querol et al., Prot. Eng. (1996) 9:265), desired glycosylation sites (see, e.g., Olsen and Thomsen, J. Gen. Microbiol. (1991) 137:579), desired disulfide bridges (see, e.g., Clarke et al., Biochemistry (1993) 32:4322; and Wakarchuk et al., Protein Eng. (1994) 7:1379), desired metal binding sites (see, e.g., Toma et al., Biochemistry (1991) 30:97, and Haezerbrouck et al., Protein Eng. (1993) 6:643), and desired substitutions within proline loops (see, e.g., Masul et al., Appl. Env. Microbiol. (1994) 60:3579). Cysteine-depleted muteins can be produced as disclosed in U.S. Pat. No. 4,959,314.

[0114] Variants also include fragments of the polypeptides disclosed herein, particularly biologically active fragments and/or fragments corresponding to functional domains. Fragments of interest will typically be at least about 8 amino acids (aa) 10 aa, 15 aa, 20 aa, 25 aa, 30 aa, 35 aa, 40 aa, to at least about 45 aa in length, usually at least about 50 aa in length, at least about 75 aa, at least about 100 aa, at least about 125 aa, at least about 150 aa in length, at least about 200 aa, at least about 300 aa, at least about 400 aa and can be as long as 500 aa in length or longer, but will usually not exceed about 1000 aa in length, where the fragment will have a stretch of amino acids that is identical to a polypeptide encoded by a polynucleotide having a sequence of any one of the polynucleotide sequences provided herein, or a homolog thereof. The protein variants described herein are encoded by polynucleotides that are within the scope of the invention. The genetic code can be used to select the appropriate codons to construct the corresponding variants.

[0115] While altered expression of the polynucleotides associated with cancer is observed, altered levels of expression of the polypeptides encoded by these polynucleotides may likely play a role in cancers.

[0116] Also included within one embodiment of CA proteins are amino acid variants of the naturally occurring sequences, as determined herein. Preferably, the variants are preferably greater than about 75% homologous to the wild-type sequence, more preferably greater than about 80%, even more preferably greater than about 85% and most preferably greater than 90%. The present application is also directed to proteins containing polypeptides at least 80%, 85%, 90%, 95%, 96%, 97%, 98% or 99% identical to a CA polypeptide sequence set forth herein. As for nucleic acids, homology in this context means sequence similarity or identity, with identity being preferred. This homology will be determined using standard techniques known in the art as are outlined above for the nucleic acid homologies.

[0117] CA proteins of the present invention may be shorter or longer than the wild type amino acid sequences. Thus, in a preferred embodiment, included within the definition of CA proteins are portions or fragments of the wild type sequences herein. In addition, as outlined above, the CA nucleic acids of the invention may be used to obtain additional coding regions, and thus additional protein sequence, using techniques known in the art.

[0118] In a preferred embodiment, the CA proteins are derivative or variant CA proteins as compared to the wild-type sequence. That is, as outlined more fully below, the derivative CA peptide will contain at least one amino acid substitution, deletion or insertion, with amino acid substitutions being particularly preferred. The amino acid substitution, insertion or deletion may occur at any residue within the CA peptide.

[0119] Also included in an embodiment of CA proteins of the present invention are amino acid sequence variants. These variants fall into one or more of three classes: substitutional, insertional or deletional variants. These variants ordinarily are prepared by site-specific mutagenesis of nucleotides in the DNA encoding the CA protein, using cassette or PCR mutagenesis or other techniques well known in the art, to produce DNA encoding the variant, and thereafter expressing the DNA in recombinant cell culture as outlined above. However, variant CA protein fragments having up to about 100-150 residues may be prepared by in vitro synthesis using established techniques. Amino acid sequence variants are characterized by the predetermined nature of the variation, a feature that sets them apart from naturally occurring allelic or interspecies variation of the CA protein amino acid sequence. The variants typically exhibit the same qualitative biological activity as the naturally occurring analogue, although variants can also be selected which have modified characteristics as will be more fully outlined below.

[0120] While the site or region for introducing an amino acid sequence variation is predetermined, the mutation per se need not be predetermined. For example, in order to optimize the performance of a mutation at a given site, random mutagenesis may be conducted at the target codon or region and the expressed CA variants screened for the optimal combination of desired activity. Techniques for making substitution mutations at predetermined sites in DNA having a known sequence are well known, for example, M13 primer mutagenesis and LAR mutagenesis. Screening of the mutants is done using assays of CA protein activities.

[0121] Amino acid substitutions are typically of single residues; insertions usually will be on the order of from about 1 to 20 amino acids, although considerably larger insertions may be tolerated. Deletions range from about 1 to about 20 residues, although in some cases deletions may be much larger.

[0122] Substitutions, deletions, insertions or any combination thereof may be used to arrive at a final derivative. Generally these changes are done on a few amino acids to minimize the alteration of the molecule. However, larger changes may be tolerated in certain circumstances. When small alterations in the characteristics of the CA protein are desired, substitutions are generally made in accordance with the following chart:

CHART 1

| | |
|---|---|
| Original Residue | Exemplary Substitutions |

| | |
|---|---|
| Ala | Ser |
| Arg | Lys |
| Asn | Gln, His |
| Asp | Glu |
| Cys | Ser |
| Gln | Asn |
| Glu | Asp |
| Gly | Pro |
| His | Asn, Gln |
| Ile | Leu, Val |
| Leu | Ile, Val |
| Lys | Arg, Gln, Glu |
| Met | Leu, Ile |
| Phe | Met, Leu, Tyr |
| Ser | Thr |
| Thr | Ser |
| Trp | Tyr |
| Tyr | Trp, Phe |
| Val | Ile, Leu |

[0123] Substantial changes in function or immunological identity are made by selecting substitutions that are less conservative than those shown in Chart I. For example, substitutions may be made full length to more significantly affect one or more of the following: the structure of the polypeptide backbone in the area of the alteration (e.g., the alpha-helical or beta-sheet structure); the charge or hydrophobicity of the molecule at the target site; and the bulk of the side chain. The substitutions which in general are expected to produce the greatest changes in the polypeptide's properties are those in which (a) a hydrophilic residue, e.g. seryl or threonyl is substituted for (or by) a hydrophobic residue, e.g. leucyl, isoleucyl, phenylalanyl, valyl or alanyl; (b) a cysteine or proline is substituted for (or by) any other residue; (c) a residue having an electropositive side chain, e.g. lysyl, arginyl, or histidyl, is substituted for (or by) an electronegative residue, e.g. glutamyl or aspartyl; or (d) a residue having a bulky side chain, e.g. phenylalanine, is substituted for (or by) one not having a side chain, e.g. glycine.

[0124] The variants typically exhibit the same qualitative biological activity and will elicit the same immune response as the naturally-occurring analogue, although variants also are selected to modify the characteristics of the CA proteins as needed. Alternatively, the variant may be designed such that the biological activity of the CA protein is altered. For example, glycosylation sites may be altered or removed, dominant negative mutations created, etc.

[0125] Covalent modifications of CA polypeptides are included within the scope of this invention, for example for use in screening. One type of covalent modification includes reacting targeted amino acid residues of a CA polypeptide with an organic derivatizing agent that is capable of reacting with selected side chains or the N-or C-terminal residues of a CA polypeptide. Derivatization with bifunctional agents is useful, for instance, for crosslinking CA polypeptides to a water-insoluble support matrix or surface for use in the method for purifying anti-CA antibodies or screening assays, as is more fully described below. Commonly used crosslinking agents include, e.g., 1,1-bis(diazoacetyl)-2-phenylethane, glutaraldehyde, N-hydroxysuccinimide esters, for example, esters with 4-azidosalicylic acid, homobifunctional imidoesters, including disuccinimidyl esters such as 3,3′-dithiobis(succinimidylpropionate), bifunctional maleimides such as bis-N-maleimido-1,8-octane and agents such as methyl-3-[(p-azidophenyl)dithio]propioimidate.

[0126] Other modifications include deamidation of glutaminyl and asparaginyl residues to the corresponding glutamyl and aspartyl residues, respectively, hydroxylation of proline and lysine, phosphorylation of hydroxyl groups of seryl, threonyl or tyrosyl residues, methylation of the a-amino groups of lysine, arginine, and histidine side chains [T. E. Creighton, Proteins: Structure and Molecular Properties, W. H. Freeman & Co., San Francisco, pp. 79-86 (1983)], acetylation of the N-terminal amine, and amidation of any C-terminal carboxyl group.

[0127] Another type of covalent modification of the CA polypeptide included within the scope of this invention comprises altering the native glycosylation pattern of the polypeptide. “Altering the native glycosylation pattern” is intended for purposes herein to mean deleting one or more carbohydrate moieties found in native sequence CA polypeptide, and/or adding one or more glycosylation sites that are not present in the native sequence CA polypeptide.

[0128] Addition of glycosylation sites to CA polypeptides may be accomplished by altering the amino acid sequence thereof. The alteration may be made, for example, by the addition of, or substitution by, one or more serine or threonine residues to the native sequence CA polypeptide (for O-linked glycosylation sites). The CA amino acid sequence may optionally be altered through changes at the DNA level, particularly by mutating the DNA encoding the CA polypeptide at preselected bases such that codons are generated that will translate into the desired amino acids.

[0129] Another means of increasing the number of carbohydrate moieties on the CA polypeptide is by chemical or enzymatic coupling of glycosides to the polypeptide. Such methods are described in the art, e.g., in WO 87/05330 published 11 Sep. 1987, and in Aplin and Wriston, LA Crit. Rev. Biochem., pp. 259-306 (1981).

[0130] Removal of carbohydrate moieties present on the CA polypeptide may be accomplished chemically or enzymatically or by mutational substitution of codons encoding for amino acid residues that serve as targets for glycosylation. Chemical deglycosylation techniques are known in the art and described, for instance, by Hakimuddin, et al., Arch. Biochem. Biophys., 259:52 (1987) and by Edge et al., Anal. Biochem., 118:131 (1981). Enzymatic cleavage of carbohydrate moieties on polypeptides can be achieved by the use of a variety of endo- and exo-glycosidases as described by Thotakura et al., Meth. Enzymol., 138:350 (1987).

[0131] Another type of covalent modification of CA comprises linking the CA polypeptide to one of a variety of nonproteinaceous polymers, e.g., polyethylene glycol, polypropylene glycol, or polyoxyalkylenes, in the manner set forth in U.S. Pat. Nos. 4,640,835; 4,496,689; 4,301,144; 4,670,417; 4,791,192 or 4,179,337.

[0132] CA polypeptides of the present invention may also be modified in a way to form chimeric molecules comprising a CA polypeptide fused to another, heterologous polypeptide or amino acid sequence. In one embodiment, such a chimeric molecule comprises a fusion of a CA polypeptide with a tag polypeptide that provides an epitope to which an anti-tag antibody can selectively bind. The epitope tag is generally placed at the amino-or carboxyl-terminus of the CA polypeptide, although internal fusions may also be tolerated in some instances. The presence of such epitope-tagged forms of a CA polypeptide can be detected using an antibody against the tag polypeptide. Also, provision of the epitope tag enables the CA polypeptide to be readily purified by affinity purification using an anti-tag antibody or another type of affinity matrix that binds to the epitope tag. In an alternative embodiment, the chimeric molecule may comprise a fusion of a CA polypeptide with an immunoglobulin or a particular region of an immunoglobulin. For a bivalent form of the chimeric molecule, such a fusion could be to the Fc region of an IgG molecule.

[0133] Various tag polypeptides and their respective antibodies are well known in the art. Examples include poly-histidine (poly-his) or poly-histidine-glycine (poly-his-gly) tags; the flu HA tag polypeptide and its antibody 12CA5 [Field et al., Mol. Cell. Biol., 8:2159-2165 (1988)]; the c-myc tag and the 8F9, 3C7, 6E10, G4, B7 and 9E10 antibodies thereto [Evan et al., Molecular and Cellular Biology, 5:3610-3616 (1985)]; and the Herpes Simplex virus glycoprotein D (gD) tag and its antibody [Paborsky et al., Protein Engineering, 3(6):547-553 (1990)]. Other tag polypeptides include the Flag-peptide [Hopp et al., BioTechnology, 6:1204-1210 (1988)]; the KT3 epitope peptide [Martin et al., Science, 255:192-194 (1992)]; tubulin epitope peptide [Skinner et al., J. Biol. Chem., 266:15163-15166 (1991)]; and the T7 gene 10 protein peptide tag [Lutz-Freyermuth et al., Proc. Natl. Acad. Sci. USA, 87:6393-6397 (1990)].

[0134] Also included with the definition of CA protein in one embodiment are other CA proteins of the CA family, and CA proteins from other organisms, which are cloned and expressed as outlined below. Thus, probe or degenerate polymerase chain reaction (PCR) primer sequences may be used to find other related CA proteins from humans or other organisms. As will be appreciated by those in the art, particularly useful probe and/or PCR primer sequences include the unique areas of the CA nucleic acid sequence. As is generally known in the art, preferred PCR primers are from about 15 to about 35 nucleotides in length, with from about 20 to about 30 being preferred, and may contain inosine as needed. The conditions for the PCR reaction are well known in the art.

[0135] In addition, as is outlined herein, CA proteins can be made that are longer than those encoded by the nucleic acids of the figures, for example, by the elucidation of additional sequences, the addition of epitope or purification tags, the addition of other fusion sequences, etc.

[0136] CA proteins may also be identified as being encoded by CA nucleic acids. Thus, CA proteins are encoded by nucleic acids that will hybridize to the sequences of the sequence listings, or their complements, as outlined herein.

[0137] CA Antigens and Antibodies Thereto

[0138] In one embodiment, the invention provides CA specific antibodies. In a preferred embodiment, when the CA protein is to be used to generate antibodies, for example for immunotherapy, the CA protein should share at least one epitope or determinant with the full-length protein. By “epitope” or “determinant” herein is meant a portion of a protein that will generate and/or bind an antibody or T-cell receptor in the context of MHC. Thus, in most instances, antibodies made to a smaller CA protein will be able to bind to the full-length protein. In a preferred embodiment, the epitope is unique; that is, antibodies generated to a unique epitope show little or no cross-reactivity.

[0139] Any polypeptide sequence encoded by the CA polynucleotide sequences may be analyzed to determine certain preferred regions of the polypeptide. Regions of high antigenicity are determined from data by DNASTAR analysis by choosing values that represent regions of the polypeptide that are likely to be exposed on the surface of the polypeptide in an environment in which antigen recognition may occur in the process of initiation of an immune response. For example, the amino acid sequence of a polypeptide encoded by a CA polynucleotide sequence may be analyzed using the default parameters of the DNASTAR computer algorithm (DNASTAR, Inc., Madison, Wis.; http://www.dnastar.com/).

[0140] Polypeptide features that may be routinely obtained using the DNASTAR computer algorithm include, but are not limited to, Gamier-Robson alpha-regions, beta-regions, turn-regions, and coil-regions (Gamier et al. J. Mol. Biol., 120: 97 (1978)); Chou-Fasman alpha-regions, beta-regions, and turn-regions (Adv. in Enzymol., 47:45-148 (1978)); Kyte-Doolittle hydrophilic regions and hydrophobic regions (J. Mol. Biol., 157:105-132 (1982)); Eisenberg alpha- and beta-amphipathic regions; Karplus-Schulz flexible regions; Emini surface-forming regions (J. Virol., 55(3):836-839 (1985)); and Jameson-Wolf regions of high antigenic index (CABIOS, 4(1):181-186 (1988)). Kyte-Doolittle hydrophilic regions and hydrophobic regions, Emini surface-forming regions, and Jameson-Wolf regions of high antigenic index (i.e., containing four or more contiguous amino acids having an antigenic index of greater than or equal to 1.5, as identified using the default parameters of the Jameson-Wolf program) can routinely be used to determine polypeptide regions that exhibit a high degree of potential for antigenicity. One approach for preparing antibodies to a protein is the selection and preparation of an amino acid sequence of all or part of the protein, chemically synthesizing the sequence and injecting it into an appropriate animal, typically a rabbit, hamster or a mouse. Oligopeptides can be selected as candidates for the production of an antibody to the CA protein based upon the oligopeptides lying in hydrophilic regions, which are thus likely to be exposed in the mature protein. Additional oligopeptides can be determined using, for example, the Antigenicity Index, Welling, G. W. et al., FEBS Lett. 188:215-218 (1985), incorporated herein by reference.

[0141] In one embodiment, the term “antibody” includes antibody fragments, as are known in the art, including Fab, Fab₂, single chain antibodies (Fv for example), chimeric antibodies, etc., either produced by the modification of whole antibodies or those synthesized de novo using recombinant DNA technologies.

[0142] Methods of preparing polyclonal antibodies are known to the skilled artisan. Polyclonal antibodies can be raised in a mammal, for example, by one or more injections of an immunizing agent and, if desired, an adjuvant. Typically, the immunizing agent and/or adjuvant will be injected in the mammal by multiple subcutaneous or intraperitoneal injections. The immunizing agent may include a protein encoded by a nucleic acid of the figures or fragment thereof or a fusion protein thereof. It may be useful to conjugate the immunizing agent to a protein known to be immunogenic in the mammal being immunized. Examples of such immunogenic proteins include but are not limited to keyhole limpet hemocyanin, serum albumin, bovine thyroglobulin, and soybean trypsin inhibitor. Examples of adjuvants that may be employed include Freund's complete adjuvant and MPL-TDM adjuvant (monophosphoryl Lipid A, synthetic trehalose dicorynomycolate). The immunization protocol may be selected by one skilled in the art without undue experimentation.

[0143] The antibodies may, alternatively, be monoclonal antibodies. Monoclonal antibodies may be prepared using hybridoma methods, such as those described by Kohler and Milstein, Nature, 256:495 (1975). In a hybridoma method, a mouse, hamster, or other appropriate host animal, is typically immunized with an immunizing agent to elicit lymphocytes that produce or are capable of producing antibodies that will specifically bind to the immunizing agent. Alternatively, the lymphocytes may be immunized in vitro. The immunizing agent will typically include a polypeptide encoded by a nucleic acid of Tables 1-13, or fragment thereof or a fusion protein thereof. Generally, either peripheral blood lymphocytes (“PBLs”) are used if cells of human origin are desired, or spleen cells or lymph node cells are used if non-human mammalian sources are desired. The lymphocytes are then fused with an immortalized cell line using a suitable fusing agent, such as polyethylene glycol, to form a hybridoma cell (Goding, Monoclonal Antibodies: Principles and Practice, Academic Press, (1986) pp. 59-103). Immortalized cell lines are usually transformed mammalian cells, particularly myeloma cells of rodent, bovine and human origin. Usually, rat or mouse myeloma cell lines are employed. The hybridoma cells may be cultured in a suitable culture medium that preferably contains one or more substances that inhibit the growth or survival of the unfused, immortalized cells. For example, if the parental cells lack the enzyme hypoxanthine guanine phosphoribosyl transferase (HGPRT or HPRT), the culture medium for the hybridomas typically will include hypoxanthine, aminopterin, and thymidine (“HAT medium”), which substances prevent the growth of HGPRT-deficient cells.

[0144] Monoclonal antibody technology is used in implementing research, diagnosis and therapy. Monoclonal antibodies are used in radioimmunoassays, enzyme-linked immunosorbent assays, immunocytopathology, and flow cytometry for in vitro diagnosis, and in vivo for diagnosis and immunotherapy of human disease. Waldmann, T. A. (1991) Science 252:1657-1662. In particular, monoclonal antibodies have been widely applied to the diagnosis and therapy of cancer, wherein it is desirable to target malignant lesions while avoiding normal tissue. See, e.g., U.S. Pat. Nos. 4,753,894 to Frankel, et al.; 4,938,948 to Ring et al.; and 4,956,453 to Bjorn et al.

[0145] In one embodiment, the antibodies are bispecific antibodies. Bispecific antibodies are monoclonal, preferably human or humanized, antibodies that have binding specificities for at least two different antigens. A number of “humanized” antibody molecules comprising an antigen-binding site derived from a non-human immunoglobulin have been described, including chimeric antibodies having rodent V regions and their associated CDRs fused to human constant domains (Winter et al. (1991) Nature 349:293-299; Lobuglio et al. (1989) Proc. Nat. Acad. Sci. USA 86:4220-4224; Shaw et al. (1987) J Immunol. 138:4534-4538; and Brown et al. (1987) Cancer Res. 47:3577-3583), rodent CDRs grafted into a human supporting FR prior to fusion with an appropriate human antibody constant domain (Riechmann et al. (1988) Nature 332:323-327; Verhoeyen et al. (1988) Science 239:1534-1536; and Jones et al. (1986) Nature 321:522-525), and rodent CDRs supported by recombinantly veneered rodent FRs (European Patent Publication No. 519,596, published Dec. 23, 1992). These “humanized” molecules are designed to minimize unwanted immunological response toward rodent antihuman antibody molecules which limits the duration and effectiveness of therapeutic applications of those moieties in human recipients. In the present case, one of the binding specificities is for a protein encoded by a nucleic acid of Tables 1-13, or a fragment thereof, the other one is for any other antigen, and preferably for a cell-surface protein or receptor or receptor subunit, preferably one that is tumor specific.

[0146] In a preferred embodiment, the antibodies to CA are capable of reducing or eliminating the biological function of CA, as is described below. That is, the addition of anti-CA antibodies (either polyclonal or preferably monoclonal) to CA (or cells containing CA) may reduce or eliminate the CA activity. Generally, at least a 25% decrease in activity is preferred, with at least about 50% being particularly preferred and about a 95-100% decrease being especially preferred.

[0147] In a preferred embodiment the antibodies to the CA proteins are humanized antibodies. “Humanized” antibodies refer to a molecule having an antigen binding site that is substantially derived from an immunoglobulin from a non-human species and the remaining immunoglobulin structure of the molecule based upon the structure and/or sequence of a human immunoglobulin. The antigen binding site may comprise either complete variable domains fused onto constant domains or only the complementarity determining regions (CDRs) grafted onto appropriate framework regions in the variable domains. Antigen binding sites may be wild type or modified by one or more amino acid substitutions, e.g., modified to resemble human immunoglobulin more closely. Alternatively, a humanized antibody may be derived from a chimeric antibody that retains or substantially retains the antigen-binding properties of the parental, non-human, antibody but which exhibits diminished immunogenicity as compared to the parental antibody when administered to humans. The phrase “chimeric antibody,” as used herein, refers to an antibody containing sequence derived from two different antibodies (see, e.g., U.S. Pat. No. 4,816,567) that typically originate from different species. Typically, in these chimeric antibodies, the variable region of both light and heavy chains mimics the variable regions of antibodies derived from one species of mammals, while the constant portions are homologous to the sequences in antibodies derived from another. Most typically, chimeric antibodies comprise human and murine antibody fragments, generally human constant and mouse variable regions. Humanized antibodies include human immunoglobulins (recipient antibody) in which residues form a complementary determining region (CDR) of the recipient are replaced by residues from a CDR of a non-human species (donor antibody) such as mouse, rat or rabbit having the desired specificity, affinity and capacity. In some instances, Fv framework residues of the human immunoglobulin are replaced by corresponding non-human residues. Humanized antibodies may also comprise residues that are found neither in the recipient antibody nor in the imported CDR or framework sequences. In general, the humanized antibody will comprise substantially all of at least one, and typically two, variable domains, in which all or substantially all of the CDR regions correspond to those of a non-human immunoglobulin and all or substantially all of the framework residues (FR) regions are those of a human immunoglobulin consensus sequence. The humanized antibody optimally also will comprise at least a portion of an immunoglobulin constant region (Fc), typically that of a human immunoglobulin (Jones et al., Nature, 321:522-525 (1986); Riechmann et al., Nature, 332:323-329 (1988); and Presta, Curr. Op. Struct. Biol., 2:593-596 (1992)). One clear advantage to such chimeric forms is that, for example, the variable regions can conveniently be derived from presently known sources using readily available hybridomas or B cells from non human host organisms in combination with constant regions derived from, for example, human cell preparations. While the variable region has the advantage of ease of preparation, and the specificity is not affected by its source, the constant region being human, is less likely to elicit an immune response from a human subject when the antibodies are injected than would the constant region from a non-human source. However, the definition is not limited to this particular example.

[0148] Because humanized antibodies are far less immunogenic in humans than the parental mouse monoclonal antibodies, they can be used for the treatment of humans with far less risk of anaphylaxis. Thus, these antibodies may be preferred in therapeutic applications that involve in vivo administration to a human such as, e.g., use as radiation sensitizers for the treatment of neoplastic disease or use in methods to reduce the side effects of, e.g., cancer therapy. Methods for humanizing non-human antibodies are well known in the art. Generally, a humanized antibody has one or more amino acid residues introduced into it from a source that is non-human. These non-human amino acid residues are often referred to as import residues, which are typically taken from an import variable domain. Humanization can be essentially performed following the method of Winter and co-workers (Jones et al., Nature 321:522-525 (1986); Riechmann et al., Nature 332:323-327 (1988); Verhoeyen et al., Science 239:1534-1536 (1988)), by substituting rodent CDRs or CDR sequences for the corresponding sequences of a human antibody. Accordingly, such humanized antibodies are chimeric antibodies (U.S. Pat. No. 4,816,567), wherein substantially less than an intact human variable domain has been substituted by the corresponding sequence from a non-human species. In practice, humanized antibodies are typically human antibodies in which some CDR residues and possibly some FR residues are substituted by residues from analogous sites in rodent antibodies.

[0149] Human antibodies can also be produced using various techniques known in the art, including phage display libraries [Hoogenboom and Winter, J. Mol. Biol., 227:381 (1991); Marks et al., J. Mol. Biol., 222:581 (1991)]. The techniques of Cole et al. and Boerner et al. are also available for the preparation of human monoclonal antibodies [Cole et al., Monoclonal Antibodies and Cancer Therapy, Alan R. Liss, p. 77 (1985) and Boerner et al., J. Immunol., 147(1):86-95 (1991)]. Humanized antibodies may be achieved by a variety of methods including, for example: (1) grafting the non-human complementarity determining regions (CDRs) onto a human framework and constant region (a process referred to in the art as “humanizing”), or, alternatively, (2) transplanting the entire non-human variable domains, but “cloaking” them with a human-like surface by replacement of surface residues (a process referred to in the art as “veneering”). In the present invention, humanized antibodies will include both “humanized” and “veneered” antibodies. Similarly, human antibodies can be made by introducing human immunoglobulin loci into transgenic animals, e.g., mice in which the endogenous immunoglobulin genes have been partially or completely inactivated. Upon challenge, human antibody production is observed, which closely resembles that seen in humans in all respects, including gene rearrangement, assembly, and antibody repertoire. This approach is described, for example, in U.S. Pat. Nos. 5,545,807; 5,545,806; 5,569,825; 5,625,126; 5,633,425; 5,661,016, and in the following scientific publications: Marks et al., Bio/Technology 10, 779-783 (1992); Lonberg et al., Nature 368 856-859 (1994); Morrison, Nature 368, 812-13 (1994); Fishwild et al., Nature Biotechnology 14, 845-51 (1996); Neuberger, Nature Biotechnology 14, 826 (1996); Lonberg and Huszar, Intern. Rev. Immunol. 13 65-93 (1995); Jones et al., Nature 321:522-525 (1986); Morrison et al., Proc. Natl. Acad. Sci, U.S.A., 81:6851-6855 (1984); Morrison and Oi, Adv. Immunol., 44:65-92 (1988); Verhoeyer et al., Science 239:1534-1536 (1988); Padlan, Molec. Immun. 28:489-498 (1991); Padlan, Molec. Immunol. 31(3):169-217 (1994); and Kettleborough, C. A. et al., Protein Eng. 4(7):773-83 (1991) each of which is incorporated herein by reference.

[0150] The phrase “complementarity determining region” refers to amino acid sequences which together define the binding affinity and specificity of the natural Fv region of a native immunoglobulin binding site. See, e.g., Chothia et al., J. Mol. Biol. 196:901-917 (1987); Kabat et al., U.S. Dept. of Health and Human Services NIH Publication No. 91-3242 (1991). The phrase “constant region” refers to the portion of the antibody molecule that confers effector functions. In the present invention, mouse constant regions are substituted by human constant regions. The constant regions of the subject humanized antibodies are derived from human immunoglobulins. The heavy chain constant region can be selected from any of the five isotypes: alpha, delta, epsilon, gamma or mu. One method of humanizing antibodies comprises aligning the non-human heavy and light chain sequences to human heavy and light chain sequences, selecting and replacing the non-human framework with a human framework based on such alignment, molecular modeling to predict the conformation of the humanized sequence and comparing to the conformation of the parent antibody. This process is followed by repeated back mutation of residues in the CDR region that disturb the structure of the CDRs until the predicted conformation of the humanized sequence model closely approximates the conformation of the non-human CDRs of the parent non-human antibody. Such humanized antibodies may be further derivatized to facilitate uptake and clearance, e.g, via Ashwell receptors. See, e.g., U.S. Pat. Nos. 5,530,101 and 5,585,089 which are incorporated herein by reference.

[0151] Humanized antibodies to CA polypeptides can also be produced using transgenic animals that are engineered to contain human immunoglobulin loci. For example, WO 98/24893 discloses transgenic animals having a human Ig locus wherein the animals do not produce functional endogenous immunoglobulins due to the inactivation of endogenous heavy and light chain loci. WO 91/10741 also discloses transgenic non-primate mammalian hosts capable of mounting an immune response to an immunogen, wherein the antibodies have primate constant and/or variable regions, and wherein the endogenous immunoglobulin-encoding loci are substituted or inactivated. WO 96/30498 discloses the use of the Cre/Lox system to modify the immunoglobulin locus in a mammal, such as to replace all or a portion of the constant or variable region to form a modified antibody molecule. WO 94/02602 discloses non-human mammalian hosts having inactivated endogenous Ig loci and functional human Ig loci. U.S. Pat. No. 5,939,598 discloses methods of making transgenic mice in which the mice lack endogenous heavy chains, and express an exogenous immunoglobulin locus comprising one or more xenogeneic constant regions.

[0152] Using a transgenic animal described above, an immune response can be produced to a selected antigenic molecule, and antibody-producing cells can be removed from the animal and used to produce hybridomas that secrete human monoclonal antibodies. Immunization protocols, adjuvants, and the like are known in the art, and are used in immunization of, for example, a transgenic mouse as described in WO 96/33735. The monoclonal antibodies can be tested for the ability to inhibit or neutralize the biological activity or physiological effect of the corresponding protein.

[0153] In the present invention, CA polypeptides of the invention and variants thereof are used to immunize a transgenic animal as described above. Monoclonal antibodies are made using methods known in the art, and the specificity of the antibodies is tested using isolated CA polypeptides. Methods for preparation of the human or primate CA or an epitope thereof include, but are not limited to chemical synthesis, recombinant DNA techniques or isolation from biological samples. Chemical synthesis of a peptide can be performed, for example, by the classical Merrifeld method of solid phase peptide synthesis (Merrifeld, J. Am. Chem. Soc. 85:2149, 1963 which is incorporated by reference) or the FMOC strategy on a Rapid Automated Multiple Peptide Synthesis system (E. I. du Pont de Nemours Company, Wilmington, Del.) (Caprino and Han, J. Org. Chem. 37:3404, 1972 which is incorporated by reference).

[0154] Polyclonal antibodies can be prepared by immunizing rabbits or other animals by injecting antigen followed by subsequent boosts at appropriate intervals. The animals are bled and sera assayed against purified CA proteins usually by ELISA or by bioassay based upon the ability to block the action of CA proteins. When using avian species, e.g., chicken, turkey and the like, the antibody can be isolated from the yolk of the egg. Monoclonal antibodies can be prepared after the method of Milstein and Kohler by fusing splenocytes from immunized mice with continuously replicating tumor cells such as myeloma or lymphoma cells. (Milstein and Kohler, Nature 256:495-497, 1975; Gulfre and Milstein, Methods in Enzymology: Immunochemical Techniques 73:1-46, Langone and Banatis eds., Academic Press, 1981 which are incorporated by reference). The hybridoma cells so formed are then cloned by limiting dilution methods and supernates assayed for antibody production by ELISA, RIA or bioassay.

[0155] The unique ability of antibodies to recognize and specifically bind to target proteins provides an approach for treating an overexpression of the protein. Thus, another aspect of the present invention provides for a method for preventing or treating diseases involving overexpression of a CA polypeptide by treatment of a patient with specific antibodies to the CA protein.

[0156] Specific antibodies, either polyclonal or monoclonal, to the CA proteins can be produced by any suitable method known in the art as discussed above. For example, murine or human monoclonal antibodies can be produced by hybridoma technology or, alternatively, the CA proteins, or an immunologically active fragment thereof, or an anti-idiotypic antibody, or fragment thereof can be administered to an animal to elicit the production of antibodies capable of recognizing and binding to the CA proteins. Such antibodies can be from any class of antibodies including, but not limited to IgG, IgA, IgM, IgD, and IgE or in the case of avian species, IgY and from any subclass of antibodies.

[0157] By immunotherapy is meant treatment of a cancer with an antibody raised against a CA protein. As used herein, immunotherapy can be passive or active. Passive immunotherapy as defined herein is the passive transfer of antibody to a recipient (patient). Active immunization is the induction of antibody and/or T-cell responses in a recipient (patient). Induction of an immune response is the result of providing the recipient with an antigen to which antibodies are raised. As appreciated by one of ordinary skill in the art, the antigen may be provided by injecting a polypeptide against which antibodies are desired to be raised into a recipient, or contacting the recipient with a nucleic acid capable of expressing the antigen and under conditions for expression of the antigen.

[0158] In a preferred embodiment, oncogenes which encode secreted growth factors may be inhibited by raising antibodies against CA proteins that are secreted proteins as described above. Without being bound by theory, antibodies used for treatment, bind and prevent the secreted protein from binding to its receptor, thereby inactivating the secreted CA protein.

[0159] In another preferred embodiment, the CA protein to which antibodies are raised is a transmembrane protein. Without being bound by theory, antibodies used for treatment, bind the extracellular domain of the CA protein and prevent it from binding to other proteins, such as circulating ligands or cell-associated molecules. The antibody may cause down-regulation of the transmembrane CA protein. As will be appreciated by one of ordinary skill in the art, the antibody may be a competitive, non-competitive or uncompetitive inhibitor of protein binding to the extracellular domain of the CA protein. The antibody is also an antagonist of the CA protein. Further, the antibody prevents activation of the transmembrane CA protein. In one aspect, when the antibody prevents the binding of other molecules to the CA protein, the antibody prevents growth of the cell. The antibody may also sensitize the cell to cytotoxic agents, including, but not limited to TNF-α, TNF-β, IL-1, INF-γ and IL-2, or chemotherapeutic agents including 5FU, vinblastine, actinomycin D, cisplatin, methotrexate, and the like. In some instances the antibody belongs to a sub-type that activates serum complement when complexed with the transmembrane protein thereby mediating cytotoxicity. Thus, cancers may be treated by administering to a patient antibodies directed against the transmembrane CA protein.

[0160] In another preferred embodiment, the antibody is conjugated to a therapeutic moiety. In one aspect the therapeutic moiety is a small molecule that modulates the activity of the CA protein. In another aspect the therapeutic moiety modulates the activity of molecules associated with or in close proximity to the CA protein. The therapeutic moiety may inhibit enzymatic activity such as protease or protein kinase activity associated with cancer.

[0161] In a preferred embodiment, the therapeutic moiety may also be a cytotoxic agent. In this method, radioisotopes, natural toxins, chemotherapy agents, or other substances (such as biological response modifiers) are chemically linked or conjugated to a monoclonal antibody to form “immunoconjugates” and “immunotoxins” which target the cytotoxic agent to tumor tissue or cells resulting in a reduction in the number of afflicted cells, thereby reducing symptoms associated with cancers, including lymphoma. Cytotoxic agents are numerous and varied and include, but are not limited to, cytotoxic drugs or toxins or active fragments of such toxins. Suitable toxins and their corresponding fragments include diphtheria A chain, exotoxin A chain, ricin A chain, abrin A chain, curcin, crotin, phenomycin, enomycin and the like. Cytotoxic agents also include radiochemicals made by conjugating radioisotopes to antibodies raised against CA proteins, or binding of a radionuclide to a chelating agent that has been covalently attached to the antibody. Targeting the therapeutic moiety to transmembrane CA proteins not only serves to increase the local concentration of therapeutic moiety in the cancer of interest, i.e., lymphoma, but also serves to reduce deleterious side effects that may be associated with the therapeutic moiety. A number of investigators have used monoclonal antibodies as carriers of cytotoxic substances in attempts to selectively direct those agents to malignant tissue. More particularly, a number of monoclonal antibodies have been conjugated to toxins such as ricin, abrin, diphtheria toxin and Pseudomonas exotoxin or to enzymatically active portions (A chains) thereof via heterobifunctional agents. See, e.g., U.S. Pat. No. 4,753,894 to Frankel et al.; Nevelle, et al. (1982) Immunol Rev 62:75-91; Ross et al. (1980) Eur. J. Biochem 104; Vitteta et al. (1982) Immunol Rev 62:158-183; Raso et al. (1982) Cancer Res 42:457-464, and Trowbridge et al. (1981) Nature 294:171-173.

[0162] In another preferred embodiment, the CA protein against which the antibodies are raised is an intracellular protein. In this case, the antibody may be conjugated to a protein that facilitates entry into the cell. In one case, the antibody enters the cell by endocytosis. In another embodiment, a nucleic acid encoding the antibody is administered to the individual or cell. Moreover, wherein the CA protein can be targeted within a cell, e.g., the nucleus, an antibody thereto contains a signal for that target localization, e.g., a nuclear localization signal.

[0163] The CA antibodies of the invention specifically bind to CA proteins. By “specifically bind” herein is meant that the antibodies bind to the protein with a binding constant in the range of 10⁻⁴-10⁻⁶ M⁻¹, with a preferred range being 10⁻⁷-10⁻⁹ M⁻¹.

[0164] In a preferred embodiment, the CA protein is purified or isolated after expression. CA proteins may be isolated or purified in a variety of ways known to those skilled in the art depending on what other components are present in the sample. Standard purification methods include electrophoretic, molecular, immunological and chromatographic techniques, including ion exchange, hydrophobic, affinity, and reverse-phase HPLC chromatography, and chromatofocusing. For example, the CA protein may be purified using a standard anti-CA antibody column. Ultrafiltration and diafiltration techniques, in conjunction with protein concentration, are also useful. For general guidance in suitable purification techniques, see Scopes, R., Protein Purification, Springer-Verlag, NY (1982). The degree of purification necessary will vary depending on the use of the CA protein. In some instances no purification will be necessary.

[0165] Detection of Cancer Phenotype

[0166] Once expressed and purified if necessary, the CA proteins and nucleic acids are useful in a number of applications. In one aspect, the expression levels of genes are determined for different cellular states in the cancer phenotype; that is, the expression levels of genes in normal tissue and in cancer tissue (and in some cases, for varying severities of lymphoma that relate to prognosis, as outlined below) are evaluated to provide expression profiles. An expression profile of a particular cell state or point of development is essentially a “fingerprint” of the state; while two states may have any particular gene similarly expressed, the evaluation of a number of genes simultaneously allows the generation of a gene expression profile that is unique to the state of the cell. By comparing expression profiles of cells in different states, information regarding which genes are important (including both up- and down-regulation of genes) in each of these states is obtained. Then, diagnosis may be done or confirmed: does tissue from a particular patient have the gene expression profile of normal or cancer tissue.

[0167] “Differential expression,” or equivalents used herein, refers to both qualitative as well as quantitative differences in the temporal and/or cellular expression patterns of genes, within and among the cells. Thus, a differentially expressed gene can qualitatively have its expression altered, including an activation or inactivation, in, for example, normal versus cancer tissue. That is, genes may be turned on or turned off in a particular state, relative to another state. As is apparent to the skilled artisan, any comparison of two or more states can be made. Such a qualitatively regulated gene will exhibit an expression pattern within a state or cell type which is detectable by standard techniques in one such state or cell type, but is not detectable in both. Alternatively, the determination is quantitative in that expression is increased or decreased; that is, the expression of the gene is either up-regulated, resulting in an increased amount of transcript, or down-regulated, resulting in a decreased amount of transcript. The degree to which expression differs need only be large enough to quantify via standard characterization techniques as outlined below, such as by use of Affymetrix GeneChip® expression arrays, Lockhart, Nature Biotechnology, 14:1675-1680 (1996), hereby expressly incorporated by reference. Other techniques include, but are not limited to, quantitative reverse transcriptase PCR, Northern analysis and RNase protection. As outlined above, preferably the change in expression (i.e. upregulation or downregulation) is at least about 50%, more preferably at least about 100%, more preferably at least about 150%, more preferably, at least about 200%, with from 300 to at least 1000% being especially preferred.

[0168] As will be appreciated by those in the art, this may be done by evaluation at either the gene transcript, or the protein level; that is, the amount of gene expression may be monitored using nucleic acid probes to the DNA or RNA equivalent of the gene transcript, and the quantification of gene expression levels, or, alternatively, the final gene product itself (protein) can be monitored, for example through the use of antibodies to the CA protein and standard immunoassays (ELISAs, etc.) or other techniques, including mass spectroscopy assays, 2D gel electrophoresis assays, etc. Thus, the proteins corresponding to CA genes, i.e. those identified as being important in a particular cancer phenotype, i.e., lymphoma, can be evaluated in a diagnostic test specific for that cancer.

[0169] In a preferred embodiment, gene expression monitoring is done and a number of genes, i.e. an expression profile, is monitored simultaneously, although multiple protein expression monitoring can be done as well. Similarly, these assays may be done on an individual basis as well.

[0170] In this embodiment, the CA nucleic acid probes may be attached to biochips as outlined herein for the detection and quantification of CA sequences in a particular cell. The assays are done as is known in the art. As will be appreciated by those in the art, any number of different CA sequences may be used as probes, with single sequence assays being used in some cases, and a plurality of the sequences described herein being used in other embodiments. In addition, while solid-phase assays are described, any number of solution based assays may be done as well.

[0171] In a preferred embodiment, both solid and solution based assays may be used to detect CA sequences that are up-regulated or down-regulated in cancers as compared to normal tissue. In instances where the CA sequence has been altered but shows the same expression profile or an altered expression profile, the protein will be detected as outlined herein.

[0172] In a preferred embodiment nucleic acids encoding the CA protein are detected. Although DNA or RNA encoding the CA protein may be detected, of particular interest are methods wherein the mRNA encoding a CA protein is detected. The presence of mRNA in a sample is an indication that the CA gene has been transcribed to form the mRNA, and suggests that the protein is expressed. Probes to detect the mRNA can be any nucleotide/deoxynucleotide probe that is complementary to and base pairs with the mRNA and includes but is not limited to oligonucleotides, cDNA or RNA. Probes also should contain a detectable label, as defined herein. In one method the mRNA is detected after immobilizing the nucleic acid to be examined on a solid support such as nylon membranes and hybridizing the probe with the sample. Following washing to remove the non-specifically bound probe, the label is detected. In another method detection of the mRNA is performed in situ. In this method permeabilized cells or tissue samples are contacted with a detectably labeled nucleic acid probe for sufficient time to allow the probe to hybridize with the target mRNA. Following washing to remove the non-specifically bound probe, the label is detected. For example a digoxygenin labeled riboprobe (RNA probe) that is complementary to the mRNA encoding a CA protein is detected by binding the digoxygenin with an anti-digoxygenin secondary antibody and developed with nitro blue tetrazolium and 5-bromo-4-chloro-3-indoyl phosphate.

[0173] In a preferred embodiment, any of the three classes of proteins as described herein (secreted, transmembrane or intracellular proteins) are used in diagnostic assays. The CA proteins, antibodies, nucleic acids, modified proteins and cells containing CA sequences are used in diagnostic assays. This can be done on an individual gene or corresponding polypeptide level, or as sets of assays.

[0174] As described and defined herein, CA proteins find use as markers of cancers, including lymphomas such as, but not limited to, Hodgkin's and non-Hodgkin's lymphoma. Detection of these proteins in putative cancer tissue or patients allows for a determination or diagnosis of the type of cancer. Numerous methods known to those of ordinary skill in the art find use in detecting cancers. In one embodiment, antibodies are used to detect CA proteins. A preferred method separates proteins from a sample or patient by electrophoresis on a gel (typically a denaturing and reducing protein gel, but may be any other type of gel including isoelectric focusing gels and the like). Following separation of proteins, the CA protein is detected by immunoblotting with antibodies raised against the CA protein. Methods of immunoblotting are well known to those of ordinary skill in the art.

[0175] In another preferred method, antibodies to the CA protein find use in in situ imaging techniques. In this method cells are contacted with from one to many antibodies to the CA protein(s). Following washing to remove non-specific antibody binding, the presence of the antibody or antibodies is detected. In one embodiment the antibody is detected by incubating with a secondary antibody that contains a detectable label. In another method the primary antibody to the CA protein(s) contains a detectable label. In another preferred embodiment each one of multiple primary antibodies contains a distinct and detectable label. This method finds particular use in simultaneous screening for a plurality of CA proteins. As will be appreciated by one of ordinary skill in the art, numerous other histological imaging techniques are useful in the invention.

[0176] In a preferred embodiment the label is detected in a fluorometer that has the ability to detect and distinguish emissions of different wavelengths. In addition, a fluorescence activated cell sorter (FACS) can be used in the method.

[0177] In another preferred embodiment, antibodies find use in diagnosing cancers from blood samples. As previously described, certain CA proteins are secreted/circulating molecules. Blood samples, therefore, are useful as samples to be probed or tested for the presence of secreted CA proteins. Antibodies can be used to detect the CA proteins by any of the previously described immunoassay techniques including ELISA, immunoblotting (Western blotting), immunoprecipitation, BIACORE technology and the like, as will be appreciated by one of ordinary skill in the art.

[0178] In a preferred embodiment, in situ hybridization of labeled CA nucleic acid probes to tissue arrays is done. For example, arrays of tissue samples, including CA tissue and/or normal tissue, are made. In situ hybridization as is known in the art can then be done.

[0179] It is understood that when comparing the expression fingerprints between an individual and a standard, the skilled artisan can make a diagnosis as well as a prognosis. It is further understood that the genes that indicate diagnosis may differ from those that indicate prognosis.

[0180] In a preferred embodiment, the CA proteins, antibodies, nucleic acids, modified proteins and cells containing CA sequences are used in prognosis assays. As above, gene expression profiles can be generated that correlate to cancer, especially lymphoma, severity, in terms of long term prognosis. Again, this may be done on either a protein or gene level, with the use of genes being preferred. As above, the CA probes are attached to biochips for the detection and quantification of CA sequences in a tissue or patient. The assays proceed as outlined for diagnosis.

[0181] Screening for CA-Targeted Drugs

[0182] In one embodiment, any of the CA sequences as described herein are used in drug screening assays. The CA proteins, antibodies, nucleic acids, modified proteins and cells containing CA sequences are used in drug screening assays or by evaluating the effect of drug candidates on a “gene expression profile” or expression profile of polypeptides. In one embodiment, the expression profiles are used, preferably in conjunction with high throughput screening techniques to allow monitoring for expression profile genes after treatment with a candidate agent, Zlokarnik, et al., Science 279, 84-8 (1998), Heid, et al., Genome Res., 6:986-994 (1996).

[0183] In another embodiment, the CA proteins, antibodies, nucleic acids, modified proteins and cells containing the native or modified CA proteins are used in screening assays. That is, the present invention provides novel methods for screening for compositions that modulate the cancer phenotype. As above, this can be done by screening for modulators of gene expression or for modulators of protein activity. Similarly, this may be done on an individual gene or protein level or by evaluating the effect of drug candidates on a “gene expression profile”. In a preferred embodiment, the expression profiles are used, preferably in conjunction with high throughput screening techniques to allow monitoring for expression profile genes after treatment with a candidate agent, see Zlokarnik, supra.

[0184] Having identified the CA genes herein, a variety of assays to evaluate the effects of agents on gene expression may be executed. In a preferred embodiment, assays may be run on an individual gene or protein level. That is, having identified a particular gene as aberrantly regulated in cancer, candidate bioactive agents may be screened to modulate the gene's regulation. “Modulation” thus includes both an increase and a decrease in gene expression or activity. The preferred amount of modulation will depend on the original change of the gene expression in normal versus tumor tissue, with changes of at least 10%, preferably 50%, more preferably 100-300%, and in some embodiments 300-1000% or greater. Thus, if a gene exhibits a 4 fold increase in tumor compared to normal tissue, a decrease of about four fold is desired; a 10 fold decrease in tumor compared to normal tissue gives a 10 fold increase in expression for a candidate agent is desired, etc. Alternatively, where the CA sequence has been altered but shows the same expression profile or an altered expression profile, the protein will be detected as outlined herein.

[0185] As will be appreciated by those in the art, this may be done by evaluation at either the gene or the protein level; that is, the amount of gene expression may be monitored using nucleic acid probes and the quantification of gene expression levels, or, alternatively, the level of the gene product itself can be monitored, for example through the use of antibodies to the CA protein and standard immunoassays. Alternatively, binding and bioactivity assays with the protein may be done as outlined below.

[0186] In a preferred embodiment, gene expression monitoring is done and a number of genes, i.e. an expression profile, is monitored simultaneously, although multiple protein expression monitoring can be done as well.

[0187] In this embodiment, the CA nucleic acid probes are attached to biochips as outlined herein for the detection and quantification of CA sequences in a particular cell. The assays are further described below.

[0188] Generally, in a preferred embodiment, a candidate bioactive agent is added to the cells prior to analysis. Moreover, screens are provided to identify a candidate bioactive agent that modulates a particular type of cancer, modulates CA proteins, binds to a CA protein, or interferes between the binding of a CA protein and an antibody.

[0189] The term “candidate bioactive agent” or “drug candidate” or grammatical equivalents as used herein describes any molecule, e.g., protein, oligopeptide, small organic or inorganic molecule, polysaccharide, polynucleotide, etc., to be tested for bioactive agents that are capable of directly or indirectly altering either the cancer phenotype, binding to and/or modulating the bioactivity of a CA protein, or the expression of a CA sequence, including both nucleic acid sequences and protein sequences. In a particularly preferred embodiment, the candidate agent suppresses a CA phenotype, for example to a normal tissue fingerprint. Similarly, the candidate agent preferably suppresses a severe CA phenotype. Generally a plurality of assay mixtures are run in parallel with different agent concentrations to obtain a differential response to the various concentrations. Typically, one of these concentrations serves as a negative control, i.e., at zero concentration or below the level of detection.

[0190] In one aspect, a candidate agent will neutralize the effect of a CA protein. By “neutralize” is meant that activity of a protein is either inhibited or counter acted against so as to have substantially no effect on a cell.

[0191] Candidate agents encompass numerous chemical classes, though typically they are organic or inorganic molecules, preferably small organic compounds having a molecular weight of more than 100 and less than about 2,500 Daltons. Preferred small molecules are less than 2000, or less than 1500 or less than 1000 or less than 500 D. Candidate agents comprise functional groups necessary for structural interaction with proteins, particularly hydrogen bonding, and typically include at least an amine, carbonyl, hydroxyl or carboxyl group, preferably at least two of the functional chemical groups. The candidate agents often comprise cyclical carbon or heterocyclic structures and/or aromatic or polyaromatic structures substituted with one or more of the above functional groups. Candidate agents are also found among biomolecules including peptides, saccharides, fatty acids, steroids, purines, pyrimidines, derivatives, structural analogs or combinations thereof. Particularly preferred are peptides.

[0192] Candidate agents are obtained from a wide variety of sources including libraries of synthetic or natural compounds. For example, numerous means are available for random and directed synthesis of a wide variety of organic compounds and biomolecules, including expression of randomized oligonucleotides. Alternatively, libraries of natural compounds in the form of bacterial, fungal, plant and animal extracts are available or readily produced. Additionally, natural or synthetically produced libraries and compounds are readily modified through conventional chemical, physical and biochemical means. Known pharmacological agents may be subjected to directed or random chemical modifications, such as acylation, alkylation, esterification, or amidification to produce structural analogs.

[0193] In one embodiment, the candidate bioactive agents are proteins. By “protein” herein is meant at least two covalently attached amino acids, which includes proteins, polypeptides, oligopeptides and peptides. The protein may be made up of naturally occurring amino acids and peptide bonds, or synthetic peptidomimetic structures. Thus “amino acid”, or “peptide residue”, as used herein means both naturally occurring and synthetic amino acids. For example, homo-phenylalanine, citrulline and norleucine are considered amino acids for the purposes of the invention. “Amino acid” also includes imino acid residues such as proline and hydroxyproline. The side chains may be in either the (R) or the (S) configuration. In the preferred embodiment, the amino acids are in the (S) or L-configuration. If non-naturally occurring side chains are used, non-amino acid substituents may be used, for example to prevent or retard in vivo degradations.

[0194] In a preferred embodiment, the candidate bioactive agents are naturally occurring proteins or fragments of naturally occurring proteins. Thus, for example, cellular extracts containing proteins, or random or directed digests of proteinaceous cellular extracts, may be used. In this way libraries of prokaryotic and eukaryotic proteins may be made for screening in the methods of the invention. Particularly preferred in this embodiment are libraries of bacterial, fungal, viral, and mammalian proteins, with the latter being preferred, and human proteins being especially preferred.

[0195] In another preferred embodiment, the candidate bioactive agents are peptides of from about 5 to about 30 amino acids, with from about 5 to about 20 amino acids being preferred, and from about 7 to about 15 being particularly preferred. The peptides may be digests of naturally occurring proteins as is outlined above, random peptides, or “biased” random peptides. By “randomized” or grammatical equivalents herein is meant that each nucleic acid and peptide consists of essentially random nucleotides and amino acids, respectively. Since generally these random peptides (or nucleic acids, discussed below) are chemically synthesized, they may incorporate any nucleotide or amino acid at any position. The synthetic process can be designed to generate randomized proteins or nucleic acids, to allow the formation of all or most of the possible combinations over the length of the sequence, thus forming a library of randomized candidate bioactive proteinaceous agents.

[0196] In one embodiment, the library is fully randomized, with no sequence preferences or constants at any position. In a preferred embodiment, the library is biased. That is, some positions within the sequence are either held constant, or are selected from a limited number of possibilities. For example, in a preferred embodiment, the nucleotides or amino acid residues are randomized within a defined class, for example, of hydrophobic amino acids, hydrophilic residues, sterically biased (either small or large) residues, towards the creation of nucleic acid binding domains, the creation of cysteines, for cross-linking, prolines for SH-3 domains, serines, threonines, tyrosines or histidines for phosphorylation sites, etc., or to purines, etc.

[0197] In one embodiment, the candidate bioactive agents are nucleic acids. As described generally for proteins, nucleic acid candidate bioactive agents may be naturally occurring nucleic acids, random nucleic acids, or “biased” random nucleic acids. In another embodiment, the candidate bioactive agents are organic chemical moieties, a wide variety of which are available in the literature.

[0198] In assays for testing alteration of the expression profile of one or more CA genes, after the candidate agent has been added and the cells allowed to incubate for some period of time, a nucleic acid sample containing the target sequences to be analyzed is prepared. The target sequence is prepared using known techniques (e.g., converted from RNA to labeled cDNA, as described above) and added to a suitable microarray. For example, an in vitro reverse transcription with labels covalently attached to the nucleosides is performed. Generally, the nucleic acids are labeled with a label as defined herein, especially with biotin-FITC or PE, Cy3 and Cy5.

[0199] As will be appreciated by those in the art, these assays can be direct hybridization assays or can comprise “sandwich assays”, which include the use of multiple probes, as is generally outlined in U.S. Pat. Nos. 5,681,702, 5,597,909, 5,545,730, 5,594,117, 5,591,584, 5,571,670, 5,580,731, 5,571,670, 5,591,584, 5,624,802, 5,635,352, 5,594,118, 5,359,100, 5,124,246 and 5,681,697, all of which are hereby incorporated by reference. In this embodiment, in general, the target nucleic acid is prepared as outlined above, and then added to the biochip comprising a plurality of nucleic acid probes, under conditions that allow the formation of a hybridization complex.

[0200] A variety of hybridization conditions may be used in the present invention, including high, moderate and low stringency conditions as outlined above. The assays are generally run under stringency conditions that allow formation of the label probe hybridization complex only in the presence of target. Stringency can be controlled by altering a step parameter that is a thermodynamic variable, including, but not limited to, temperature, formamide concentration, salt concentration, chaotropic salt concentration, pH, organic solvent concentration, etc. These parameters may also be used to control non-specific binding, as is generally outlined in U.S. Pat. No. 5,681,697. Thus it may be desirable to perform certain steps at higher stringency conditions to reduce non-specific binding.

[0201] The reactions outlined herein may be accomplished in a variety of ways, as will be appreciated by those in the art. Components of the reaction may be added simultaneously, or sequentially, in any order, with preferred embodiments outlined below. In addition, the reaction may include a variety of other reagents in the assays. These include reagents like salts, buffers, neutral proteins, e.g. albumin, detergents, etc which may be used to facilitate optimal hybridization and detection, and/or reduce non-specific or background interactions. Also reagents that otherwise improve the efficiency of the assay, such as protease inhibitors, nuclease inhibitors, anti-microbial agents, etc., may be used, depending on the sample preparation methods and purity of the target. In addition, either solid phase or solution based (i.e., kinetic PCR) assays may be used.

[0202] Once the assay is run, the data are analyzed to determine the expression levels, and changes in expression levels as between states, of individual genes, forming a gene expression profile.

[0203] In a preferred embodiment, as for the diagnosis and prognosis applications, having identified the differentially expressed gene(s) or mutated gene(s) important in any one state, screens can be run to test for alteration of the expression of the CA genes individually. That is, screening for modulation of regulation of expression of a single gene can be done. Thus, for example, in the case of target genes whose presence or absence is unique between two states, screening is done for modulators of the target gene expression.

[0204] In addition, screens can be done for novel genes that are induced in response to a candidate agent. After identifying a candidate agent based upon its ability to suppress a CA expression pattern leading to a normal expression pattern, or modulate a single CA gene expression profile so as to mimic the expression of the gene from normal tissue, a screen as described above can be performed to identify genes that are specifically modulated in response to the agent. Comparing expression profiles between normal tissue and agent treated CA tissue reveals genes that are not expressed in normal tissue or CA tissue, but are expressed in agent treated tissue. These agent specific sequences can be identified and used by any of the methods described herein for CA genes or proteins. In particular these sequences and the proteins they encode find use in marking or identifying agent-treated cells. In addition, antibodies can be raised against the agent-induced proteins and used to target novel therapeutics to the treated CA tissue sample.

[0205] Thus, in one embodiment, a candidate agent is administered to a population of CA cells, that thus has an associated CA expression profile. By “administration” or “contacting” herein is meant that the candidate agent is added to the cells in such a manner as to allow the agent to act upon the cell, whether by uptake and intracellular action, or by action at the cell surface. In some embodiments, nucleic acid encoding a proteinaceous candidate agent (i.e. a peptide) may be put into a viral construct such as a retroviral construct and added to the cell, such that expression of the peptide agent is accomplished; see PCT US97/01019, hereby expressly incorporated by reference.

[0206] Once the candidate agent has been administered to the cells, the cells can be washed if desired and are allowed to incubate under preferably physiological conditions for some period of time. The cells are then harvested and a new gene expression profile is generated, as outlined herein.

[0207] Thus, for example, CA tissue may be screened for agents that reduce or suppress the CA phenotype. A change in at least one gene of the expression profile indicates that the agent has an effect on CA activity. By defining such a signature for the CA phenotype, screens for new drugs that alter the phenotype can be devised. With this approach, the drug target need not be known and need not be represented in the original expression screening platform, nor does the level of transcript for the target protein need to change.

[0208] In a preferred embodiment, as outlined above, screens may be done on individual genes and gene products (proteins). That is, having identified a particular differentially expressed gene as important in a particular state, screening of modulators of either the expression of the gene or the gene product itself can be done. The gene products of differentially expressed genes are sometimes referred to herein as “CA proteins” or “CAP”. The CAP may be a fragment, or alternatively, be the full-length protein to the fragment encoded by the nucleic acids of Tables 1-13 (hD U-001 through hD U-013; and hR U-001 through hR U-013). In a preferred embodiment, the CAP is selected from the human protein sequences shown in Tables 1-13 (hP U-001 through hP U-013). In another embodiment, the sequences are sequence variants as further described herein.

[0209] Preferably, the CAP is a fragment approximately 14 to 24 amino acids in length. More preferably the fragment is a soluble fragment. Preferably, the fragment includes a non-transmembrane region. In a preferred embodiment, the fragment has an N-terminal Cys to aid in solubility. In one embodiment, the C-terminus of the fragment is kept as a free acid and the N-terminus is a free amine to aid in coupling, e.g., to a cysteine.

[0210] In one embodiment the CA proteins are conjugated to an immunogenic agent as discussed herein. In one embodiment the CA protein is conjugated to BSA.

[0211] In a preferred embodiment, screening is done to alter the biological function of the expression product of the CA gene. Again, having identified the importance of a gene in a particular state, screening for agents that bind and/or modulate the biological activity of the gene product can be run as is more fully outlined below.

[0212] In a preferred embodiment, screens are designed to first find candidate agents that can bind to CA proteins, and then these agents may be used in assays that evaluate the ability of the candidate agent to modulate the CAP activity and the cancer phenotype. Thus, as will be appreciated by those in the art, there are a number of different assays that may be run; binding assays and activity assays.

[0213] In a preferred embodiment, binding assays are done. In general, purified or isolated gene product is used; that is, the gene products of one or more CA nucleic acids are made. In general, this is done as is known in the art. For example, antibodies are generated to the protein gene products, and standard immunoassays are run to determine the amount of protein present. Alternatively, cells comprising the CA proteins can be used in the assays.

[0214] Thus, in a preferred embodiment, the methods comprise combining a CA protein and a candidate bioactive agent, and determining the binding of the candidate agent to the CA protein. Preferred embodiments utilize the human or mouse CA protein, although other mammalian proteins may also be used, for example for the development of animal models of human disease. In some embodiments, as outlined herein, variant or derivative CA proteins may be used.

[0215] Generally, in a preferred embodiment of the methods herein, the CA protein or the candidate agent is non-diffusably bound to an insoluble support having isolated sample receiving areas (e.g. a microtiter plate, an array, etc.). The insoluble support may be made of any composition to which the compositions can be bound, is readily separated from soluble material, and is otherwise compatible with the overall method of screening. The surface of such supports may be solid or porous and of any convenient shape. Examples of suitable insoluble supports include microtiter plates, arrays, membranes and beads. These are typically made of glass, plastic (e.g., polystyrene), polysaccharides, nylon or nitrocellulose, Teflon®, etc. Microtiter plates and arrays are especially convenient because a large number of assays can be carried out simultaneously, using small amounts of reagents and samples.

[0216] The particular manner of binding of the composition is not crucial so long as it is compatible with the reagents and overall methods of the invention, maintains the activity of the composition and is nondiffusable. Preferred methods of binding include the use of antibodies (which do not sterically block either the ligand binding site or activation sequence when the protein is bound to the support), direct binding to “sticky” or ionic supports, chemical crosslinking, the synthesis of the protein or agent on the surface, etc. Following binding of the protein or agent, excess unbound material is removed by washing. The sample receiving areas may then be blocked through incubation with bovine serum albumin (BSA), casein or other innocuous protein or other moiety.

[0217] In a preferred embodiment, the CA protein is bound to the support, and a candidate bioactive agent is added to the assay. Alternatively, the candidate agent is bound to the support and the CA protein is added. Novel binding agents include specific antibodies, non-natural binding agents identified in screens of chemical libraries, peptide analogs, etc. Of particular interest are screening assays for agents that have a low toxicity for human cells. A wide variety of assays may be used for this purpose, including labeled in vitro protein-protein binding assays, electrophoretic mobility shift assays, immunoassays for protein binding, functional assays (phosphorylation assays, etc.) and the like.

[0218] The determination of the binding of the candidate bioactive agent to the CA protein may be done in a number of ways. In a preferred embodiment, the candidate bioactive agent is labeled, and binding determined directly. For example, this may be done by attaching all or a portion of the CA protein to a solid support, adding a labeled candidate agent (for example a fluorescent label), washing off excess reagent, and determining whether the label is present on the solid support. Various blocking and washing steps may be utilized as is known in the art.

[0219] By “labeled” herein is meant that the compound is either directly or indirectly labeled with a label which provides a detectable signal, e.g. radioisotope, fluorescers, enzyme, antibodies, particles such as magnetic particles, chemiluminescers, or specific binding molecules, etc. Specific binding molecules include pairs, such as biotin and streptavidin, digoxin and antidigoxin etc. For the specific binding members, the complementary member would normally be labeled with a molecule which provides for detection, in accordance with known procedures, as outlined above. The label can directly or indirectly provide a detectable signal.

[0220] In some embodiments, only one of the components is labeled. For example, the proteins (or proteinaceous candidate agents) may be labeled at tyrosine positions using ¹²⁵I, or with fluorophores. Alternatively, more than one component may be labeled with different labels; using 125I for the proteins, for example, and a fluorophore for the candidate agents.

[0221] In a preferred embodiment, the binding of the candidate bioactive agent is determined through the use of competitive binding assays. In this embodiment, the competitor is a binding moiety known to bind to the target molecule (i.e. CA protein), such as an antibody, peptide, binding partner, ligand, etc. Under certain circumstances, there may be competitive binding as between the bioactive agent and the binding moiety, with the binding moiety displacing the bioactive agent.

[0222] In one embodiment, the candidate bioactive agent is labeled. Either the candidate bioactive agent, or the competitor, or both, is added first to the protein for a time sufficient to allow binding, if present. Incubations may be performed at any temperature which facilitates optimal activity, typically between 4 and 40° C. Incubation periods are selected for optimum activity, but may also be optimized to facilitate rapid high throughput screening. Typically between 0.1 and 1 hour will be sufficient. Excess reagent is generally removed or washed away. The second component is then added, and the presence or absence of the labeled component is followed, to indicate binding.

[0223] In a preferred embodiment, the competitor is added first, followed by the candidate bioactive agent. Displacement of the competitor is an indication that the candidate bioactive agent is binding to the CA protein and thus is capable of binding to, and potentially modulating, the activity of the CA protein. In this embodiment, either component can be labeled. Thus, for example, if the competitor is labeled, the presence of label in the wash solution indicates displacement by the agent. Alternatively, if the candidate bioactive agent is labeled, the presence of the label on the support indicates displacement.

[0224] In an alternative embodiment, the candidate bioactive agent is added first, with incubation and washing, followed by the competitor. The absence of binding by the competitor may indicate that the bioactive agent is bound to the CA protein with a higher affinity. Thus, if the candidate bioactive agent is labeled, the presence of the label on the support, coupled with a lack of competitor binding, may indicate that the candidate agent is capable of binding to the CA protein.

[0225] In a preferred embodiment, the methods comprise differential screening to identity bioactive agents that are capable of modulating the activity of the CA proteins. In this embodiment, the methods comprise combining a CA protein and a competitor in a first sample. A second sample comprises a candidate bioactive agent, a CA protein and a competitor. The binding of the competitor is determined for both samples, and a change, or difference in binding between the two samples indicates the presence of an agent capable of binding to the CA protein and potentially modulating its activity. That is, if the binding of the competitor is different in the second sample relative to the first sample, the agent is capable of binding to the CA protein.

[0226] Alternatively, a preferred embodiment utilizes differential screening to identify drug candidates that bind to the native CA protein, but cannot bind to modified CA proteins. The structure of the CA protein may be modeled, and used in rational drug design to synthesize agents that interact with that site. Drug candidates that affect CA bioactivity are also identified by screening drugs for the ability to either enhance or reduce the activity of the protein.

[0227] Positive controls and negative controls may be used in the assays. Preferably all control and test samples are performed in at least triplicate to obtain statistically significant results. Incubation of all samples is for a time sufficient for the binding of the agent to the protein. Following incubation, all samples are washed free of non-specifically bound material and the amount of bound, generally labeled agent determined. For example, where a radiolabel is employed, the samples may be counted in a scintillation counter to determine the amount of bound compound.

[0228] A variety of other reagents may be included in the screening assays. These include reagents like salts, neutral proteins, e.g. albumin, detergents, etc which may be used to facilitate optimal protein-protein binding and/or reduce non-specific or background interactions. Also reagents that otherwise improve the efficiency of the assay, such as protease inhibitors, nuclease inhibitors, anti-microbial agents, etc., may be used. The mixture of components may be added in any order that provides for the requisite binding.

[0229] Screening for agents that modulate the activity of CA proteins may also be done. In a preferred embodiment, methods for screening for a bioactive agent capable of modulating the activity of CA proteins comprise the steps of adding a candidate bioactive agent to a sample of CA proteins, as above, and determining an alteration in the biological activity of CA proteins. “Modulating the activity of a CA protein” includes an increase in activity, a decrease in activity, or a change in the type or kind of activity present. Thus, in this embodiment, the candidate agent should both bind to CA proteins (although this may not be necessary), and alter its biological or biochemical activity as defined herein. The methods include both in vitro screening methods, as are generally outlined above, and in vivo screening of cells for alterations in the presence, distribution, activity or amount of CA proteins.

[0230] Thus, in this embodiment, the methods comprise combining a CA sample and a candidate bioactive agent, and evaluating the effect on CA activity. By “CA activity” or grammatical equivalents herein is meant one of the CA protein's biological activities, including, but not limited to, its role in tumorigenesis, including cell division, preferably in lymphatic tissue, cell proliferation, tumor growth and transformation of cells. In one embodiment, CA activity includes activation of or by a protein encoded by a nucleic acid of Tables 1-13. An inhibitor of CA activity is the inhibition of any one or more CA activities.

[0231] In a preferred embodiment, the activity of the CA protein is increased; in another preferred embodiment, the activity of the CA protein is decreased. Thus, bioactive agents that are antagonists are preferred in some embodiments, and bioactive agents that are agonists may be preferred in other embodiments.

[0232] In a preferred embodiment, the invention provides methods for screening for bioactive agents capable of modulating the activity of a CA protein. The methods comprise adding a candidate bioactive agent, as defined above, to a cell comprising CA proteins. Preferred cell types include almost any cell. The cells contain a recombinant nucleic acid that encodes a CA protein. In a preferred embodiment, a library of candidate agents is tested on a plurality of cells.

[0233] In one aspect, the assays are evaluated in the presence or absence or previous or subsequent exposure of physiological signals, for example hormones, antibodies, peptides, antigens, cytokines, growth factors, action potentials, pharmacological agents including chemotherapeutics, radiation, carcinogenics, or other cells (i.e. cell-cell contacts). In another example, the determinations are determined at different stages of the cell cycle process.

[0234] In this way, bioactive agents are identified. Compounds with pharmacological activity are able to enhance or interfere with the activity of the CA protein.

[0235] Applications of the Invention

[0236] In one embodiment, a method of inhibiting cancer cell division is provided. In another embodiment, a method of inhibiting tumor growth is provided. In a further embodiment, methods of treating cells or individuals with cancer are provided.

[0237] The method comprises administration of a cancer inhibitor. In particular embodiments, the cancer inhibitor is an antisense molecule, a pharmaceutical composition, a therapeutic agent or small molecule, or a monoclonal, polyclonal, chimeric or humanized antibody. In particular embodiments, a therapeutic agent is coupled with a an antibody, preferable a monoclonal antobody.

[0238] In other embodiments, methods for detection or diagnosis of cancer cells in an individual are provided. In particular embodiments, the diagnostic/detection agent is a small molecule that pereferentially binds to a CAP according to the invention. In one embodiment, the diagnostic/detection agent is an antibody, preferably a monoclonal antobody, preferably linked to a detectable agent.

[0239] In other embodiments of the invention, animal models and transgenic animals are provided, which find use in generating animal models of cancers, particularly lymphomas and carcinomas.

[0240] (a) Antisense Molecules

[0241] In one embodiment, the cancer inhibitor is an antisense molecule. Antisense molecules as used herein include antisense or sense oligonucleotides comprising a single-stranded nucleic acid sequence (either RNA or DNA) capable of binding to target mRNA (sense) or DNA (antisense) sequences for cancer molecules. Antisense or sense oligonucleotides, according to the present invention, comprise a fragment generally at least about 14 nucleotides, preferably from about 14 to 30 nucleotides. The ability to derive an antisense or a sense oligonucleotide, based upon a cDNA sequence encoding a given protein is described in, for example, Stein and Cohen, Cancer Res. 48:2659, (1988) and van der Krol et al., BioTechniques 6:958, (1988).

[0242] Antisense molecules may be introduced into a cell containing the target nucleotide sequence by formation of a conjugate with a ligand binding molecule, as described in WO 91/04753. Suitable ligand binding molecules include, but are not limited to, cell surface receptors, growth factors, other cytokines, or other ligands that bind to cell surface receptors. Preferably, conjugation of the ligand binding molecule does not substantially interfere with the ability of the ligand binding molecule to bind to its corresponding molecule or receptor, or block entry of the sense or antisense oligonucleotide or its conjugated version into the cell. Alternatively, a sense or an antisense oligonucleotide may be introduced into a cell containing the target nucleic acid sequence by formation of an oligonucleotide-lipid complex, as described in WO 90/10448. It is understood that the use of antisense molecules or knock out and knock in models may also be used in screening assays as discussed above, in addition to methods of treatment.

[0243] (b) Pharmaceutical Compositions

[0244] Pharmaceutical compositions encompassed by the present invention include as active agent, the polypeptides, polynucleotides, antisense oligonucleotides, or antibodies of the invention disclosed herein in a therapeutically effective amount. An “effective amount” is an amount sufficient to effect beneficial or desired results, including clinical results. An effective amount can be administered in one or more administrations. For purposes of this invention, an effective amount of an adenoviral vector is an amount that is sufficient to palliate, ameliorate, stabilize, reverse, slow or delay the progression of the disease state.

[0245] The compositions can be used to treat cancer as well as metastases of primary cancer. In addition, the pharmaceutical compositions can be used in conjunction with conventional methods of cancer treatment, e.g., to sensitize tumors to radiation or conventional chemotherapy. The terms “treatment”, “treating”, “treat” and the like are used herein to generally refer to obtaining a desired pharmacologic and/or physiologic effect. The effect may be prophylactic in terms of completely or partially preventing a disease or symptom thereof and/or may be therapeutic in terms of a partial or complete stabilization or cure for a disease and/or adverse effect attributable to the disease. “Treatment” as used herein covers any treatment of a disease in a mammal, particularly a human, and includes: (a) preventing the disease or symptom from occurring in a subject which may be predisposed to the disease or symptom but has not yet been diagnosed as having it; (b) inhibiting the disease symptom, i.e., arresting its development; or (c) relieving the disease symptom, i.e., causing regression of the disease or symptom.

[0246] Where the pharmaceutical composition comprises an antibody that specifically binds to a gene product encoded by a differentially expressed polynucleotide, the antibody can be coupled to a drug for delivery to a treatment site or coupled to a detectable label to facilitate imaging of a site comprising cancer cells, such as prostate cancer cells. Methods for coupling antibodies to drugs and detectable labels are well known in the art, as are methods for imaging using detectable labels.

[0247] A “patient” for the purposes of the present invention includes both humans and other animals, particularly mammals, and organisms. Thus the methods are applicable to both human therapy and veterinary applications. In the preferred embodiment the patient is a mammal, and in the most preferred embodiment the patient is human.

[0248] The term “therapeutically effective amount” as used herein refers to an amount of a therapeutic agent to treat, ameliorate, or prevent a desired disease or condition, or to exhibit a detectable therapeutic or preventative effect. The effect can be detected by, for example, chemical markers or antigen levels. Therapeutic effects also include reduction in physical symptoms, such as decreased body temperature. The precise effective amount for a subject will depend upon the subject's size and health, the nature and extent of the condition, and the therapeutics or combination of therapeutics selected for administration. The effective amount for a given situation is determined by routine experimentation and is within the judgment of the clinician. For purposes of the present invention, an effective dose will generally be from about 0.01 mg/kg to about 5 mg/kg, or about 0.01 mg/kg to about 50 mg/kg or about 0.05 mg/kg to about 10 mg/kg of the compositions of the present invention in the individual to which it is administered.

[0249] A pharmaceutical composition can also contain a pharmaceutically acceptable carrier. The term “pharmaceutically acceptable carrier” refers to a carrier for administration of a therapeutic agent, such as antibodies or a polypeptide, genes, and other therapeutic agents. The term refers to any pharmaceutical carrier that does not itself induce the production of antibodies harmful to the individual receiving the composition, and which can be administered without undue toxicity. Suitable carriers can be large, slowly metabolized macromolecules such as proteins, polysaccharides, polylactic acids, polyglycolic acids, polymeric amino acids, amino acid copolymers, and inactive virus particles. Such carriers are well known to those of ordinary skill in the art. Pharmaceutically acceptable carriers in therapeutic compositions can include liquids such as water, saline, glycerol and ethanol. Auxiliary substances, such as wetting or emulsifying agents, pH buffering substances, and the like, can also be present in such vehicles. Typically, the therapeutic compositions are prepared as injectables, either as liquid solutions or suspensions; solid forms suitable for solution in, or suspension in, liquid vehicles prior to injection can also be prepared. Liposomes are included within the definition of a pharmaceutically acceptable carrier. Pharmaceutically acceptable salts can also be present in the pharmaceutical composition, e.g., mineral acid salts such as hydrochlorides, hydrobromides, phosphates, sulfates, and the like; and the salts of organic acids such as acetates, propionates, malonates, benzoates, and the like. A thorough discussion of pharmaceutically acceptable excipients is available in Remington: The Science and Practice of Pharmacy (1995) Alfonso Gennaro, Lippincott, Williams, & Wilkins.

[0250] The pharmaceutical compositions can be prepared in various forms, such as granules, tablets, pills, suppositories, capsules, suspensions, salves, lotions and the like. Pharmaceutical grade organic or inorganic carriers and/or diluents suitable for oral and topical use can be used to make up compositions containing the therapeutically-active compounds. Diluents known to the art include aqueous media, vegetable and animal oils and fats. Stabilizing agents, wetting and emulsifying agents, salts for varying the osmotic pressure or buffers for securing an adequate pH value, and skin penetration enhancers can be used as auxiliary agents.

[0251] The pharmaceutical compositions of the present invention comprise a CA protein in a form suitable for administration to a patient. In the preferred embodiment, the pharmaceutical compositions are in a water soluble form, such as being present as pharmaceutically acceptable salts, which is meant to include both acid and base addition salts. “Pharmaceutically acceptable acid addition salt” refers to those salts that retain the biological effectiveness of the free bases and that are not biologically or otherwise undesirable, formed with inorganic acids such as hydrochloric acid, hydrobromic acid, sulfuric acid, nitric acid, phosphoric acid and the like, and organic acids such as acetic acid, propionic acid, glycolic acid, pyruvic acid, oxalic acid, maleic acid, malonic acid, succinic acid, fumaric acid, tartaric acid, citric acid, benzoic acid, cinnamic acid, mandelic acid, methanesulfonic acid, ethanesulfonic acid, p-toluenesulfonic acid, salicylic acid and the like. “Pharmaceutically acceptable base addition salts” include those derived from inorganic bases such as sodium, potassium, lithium, ammonium, calcium, magnesium, iron, zinc, copper, manganese, aluminum salts and the like. Particularly preferred are the ammonium, potassium, sodium, calcium, and magnesium salts. Salts derived from pharmaceutically acceptable organic non-toxic bases include salts of primary, secondary, and tertiary amines, substituted amines including naturally occurring substituted amines, cyclic amines and basic ion exchange resins, such as isopropylamine, trimethylamine, diethylamine, triethylamine, tripropylamine, and ethanolamine.

[0252] The pharmaceutical compositions may also include one or more of the following: carrier proteins such as serum albumin; buffers; fillers such as microcrystalline cellulose, lactose, corn and other starches; binding agents; sweeteners and other flavoring agents; coloring agents; and polyethylene glycol. Additives are well known in the art, and are used in a variety of formulations.

[0253] The compounds having the desired pharmacological activity may be administered in a physiologically acceptable carrier to a host, as previously described. The agents may be administered in a variety of ways, orally, parenterally e.g., subcutaneously, intraperitoneally, intravascularly, etc. Depending upon the manner of introduction, the compounds may be formulated in a variety of ways. The concentration of therapeutically active compound in the formulation may vary from about 0.1-100% wgt/vol. Once formulated, the compositions contemplated by the invention can be (1) administered directly to the subject (e.g., as polynucleotide, polypeptides, small molecule agonists or antagonists, and the like); or (2) delivered ex vivo, to cells derived from the subject (e.g., as in ex vivo gene therapy). Direct delivery of the compositions will generally be accomplished by parenteral injection, e.g., subcutaneously, intraperitoneally, intravenously or intramuscularly, intratumoral or to the interstitial space of a tissue. Other modes of administration include oral and pulmonary administration, suppositories, and transdermal applications, needles, and gene guns or hyposprays. Dosage treatment can be a single dose schedule or a multiple dose schedule.

[0254] Methods for the ex vivo delivery and reimplantation of transformed cells into a subject are known in the art and described in e.g., International Publication No. WO 93/14778. Examples of cells useful in ex vivo applications include, for example, stem cells, particularly hematopoetic, lymph cells, macrophages, dendritic cells, or tumor cells. Generally, delivery of nucleic acids for both ex vivo and in vitro applications can be accomplished by, for example, dextran-mediated transfection, calcium phosphate precipitation, polybrene mediated transfection, protoplast fusion, electroporation, encapsulation of the polynucleotide(s) in liposomes, and direct microinjection of the DNA into nuclei, all well known in the art.

[0255] Once differential expression of a gene corresponding to a CA polynucleotide described herein has been found to correlate with a proliferative disorder, such as neoplasia, dysplasia, and hyperplasia, the disorder can be amenable to treatment by administration of a therapeutic agent based on the provided polynucleotide, corresponding polypeptide or other corresponding molecule (e.g., antisense, ribozyme, etc.). In other embodiments, the disorder can be amenable to treatment by administration of a small molecule drug that, for example, serves as an inhibitor (antagonist) of the function of the encoded gene product of a gene having increased expression in cancerous cells relative to normal cells or as an agonist for gene products that are decreased in expression in cancerous cells (e.g., to promote the activity of gene products that act as tumor suppressors).

[0256] The dose and the means of administration of the inventive pharmaceutical compositions are determined based on the specific qualities of the therapeutic composition, the condition, age, and weight of the patient, the progression of the disease, and other relevant factors. For example, administration of polynucleotide therapeutic compositions agents includes local or systemic administration, including injection, oral administration, particle gun or catheterized administration, and topical administration. Preferably, the therapeutic polynucleotide composition contains an expression construct comprising a promoter operably linked to a polynucleotide of at least 12, 22, 25, 30, or 35 contiguous nt of the polynucleotide disclosed herein. Various methods can be used to administer the therapeutic composition directly to a specific site in the body. For example, a small metastatic lesion is located and the therapeutic composition injected several times in several different locations within the body of tumor. Alternatively, arteries that serve a tumor are identified, and the therapeutic composition injected into such an artery, in order to deliver the composition directly into the tumor. A tumor that has a necrotic center is aspirated and the composition injected directly into the now empty center of the tumor. An antisense composition is directly administered to the surface of the tumor, for example, by topical application of the composition. X-ray imaging is used to assist in certain of the above delivery methods.

[0257] Targeted delivery of therapeutic compositions containing an antisense polynucleotide, subgenomic polynucleotides, or antibodies to specific tissues can also be used. Receptor-mediated DNA delivery techniques are described in, for example, Findeis et al., Trends Biotechnol. (1993) 11:202; Chiou et al., Gene Therapeutics: Methods And Applications Of Direct Gene Transfer (J. A. Wolff, ed.) (1994); Wu et al., J. Biol. Chem. (1988) 263:621; Wu et al., J. Biol. Chem. (1994) 269:542; Zenke et al., Proc. Natl. Acad. Sci. (USA) (1990) 87:3655; Wu et al., J. Biol. Chem. (1991) 266:338. Therapeutic compositions containing a polynucleotide are administered in a range of about 100 ng to about 200 mg of DNA for local administration in a gene therapy protocol. Concentration ranges of about 500 ng to about 50 mg, about 1 μg to about 2 mg, about 5 μg to about 500 μg, and about 20 μg to about 100 μg of DNA can also be used during a gene therapy protocol. Factors such as method of action (e.g., for enhancing or inhibiting levels of the encoded gene product) and efficacy of transformation and expression are considerations that will affect the dosage required for ultimate efficacy of the antisense subgenomic polynucleotides. Where greater expression is desired over a larger area of tissue, larger amounts of antisense subgenomic polynucleotides or the same amounts re-administered in a successive protocol of administrations, or several administrations to different adjacent or close tissue portions of, for example, a tumor site, may be required to effect a positive therapeutic outcome. In all cases, routine experimentation in clinical trials will determine specific ranges for optimal therapeutic effect.

[0258] The therapeutic polynucleotides and polypeptides of the present invention can be delivered using gene delivery vehicles. The gene delivery vehicle can be of viral or non-viral origin (see generally, Jolly, Cancer Gene Therapy (1994) 1:51; Kimura, Human Gene Therapy (1994) 5:845; Connelly, Human Gene Therapy (1995) 1:185; and Kaplitt, Nature Genetics (1994) 6:148). Expression of such coding sequences can be induced using endogenous mammalian or heterologous promoters. Expression of the coding sequence can be either constitutive or regulated.

[0259] Viral-based vectors for delivery of a desired polynucleotide and expression in a desired cell are well known in the art. Exemplary viral-based vehicles include, but are not limited to, recombinant retroviruses (see, e.g., WO 90/07936; WO 94/03622; WO 93/25698; WO 93/25234; U.S. Pat. No. 5,219,740; WO 93/11230; WO 93/10218; U.S. Pat. No. 4,777,127; GB Patent No. 2,200,651; EP 0 345 242; and WO 91/02805), alphavirus-based vectors (e.g., Sindbis virus vectors, Semliki forest virus (ATCC VR-67; ATCC VR-1247), Ross River virus (ATCC VR-373; ATCC VR-1246) and Venezuelan equine encephalitis virus (ATCC VR-923; ATCC VR-1250; ATCC VR 1249; ATCC VR-532)), and adeno-associated virus (AAV) vectors (see, e.g., WO 94/12649, WO 93/03769; WO 93/19191; WO 94/28938; WO 95/11984 and WO 95/00655). Administration of DNA linked to killed adenovirus as described in Curiel, Hum. Gene Ther. (1992) 3:147 can also be employed.

[0260] Non-viral delivery vehicles and methods can also be employed, including, but not limited to, polycationic condensed DNA linked or unlinked to killed adenovirus alone (see, e.g., Curiel, Hum. Gene Ther. (1992) 3:147); ligand-linked DNA (see, e.g., Wu, J. Biol. Chem. (1989) 264:16985); eukaryotic cell delivery vehicles cells (see, e.g., U.S. Pat. No. 5,814,482; WO 95/07994; WO 96/17072; WO 95/30763; and WO 97/42338) and nucleic charge neutralization or fusion with cell membranes. Naked DNA can also be employed. Exemplary naked DNA introduction methods are described in WO 90/11092 and U.S. Pat. No. 5,580,859. Liposomes that can act as gene delivery vehicles are described in U.S. Pat. No. 5,422,120; WO 95/13796; WO 94/23697; WO 91/14445; and EP 0524968. Additional approaches are described in Philip, Mol. Cell Biol. (1994) 14:2411, and in Woffendin, Proc. Natl. Acad. Sci. (1994) 91:1581.

[0261] Further non-viral delivery suitable for use includes mechanical delivery systems such as the approach described in Woffendin et al., Proc. Natl. Acad. Sci. USA (1994) 91(24): 11581. Moreover, the coding sequence and the product of expression of such can be delivered through deposition of photopolymerized hydrogel materials or use of ionizing radiation (see, e.g., U.S. Pat. No. 5,206,152 and WO 92/11033). Other conventional methods for gene delivery that can be used for delivery of the coding sequence include, for example, use of hand-held gene transfer particle gun (see, e.g., U.S. Pat. No. 5,149,655); use of ionizing radiation for activating transferred gene (see, e.g., U.S. Pat. No. 5,206,152 and WO 92/11033).

[0262] The administration of the CA proteins and modulators of the present invention can be done in a variety of ways as discussed above, including, but not limited to, orally, subcutaneously, intravenously, intranasally, transdermally, intraperitoneally, intramuscularly, intrapulmonary, vaginally, rectally, or intraocularly. In some instances, for example, in the treatment of wounds and inflammation, the CA proteins and modulators may be directly applied as a solution or spray.

[0263] In a preferred embodiment, CA proteins and modulators are administered as therapeutic agents, and can be formulated as outlined above. Similarly, CA genes (including both the full-length sequence, partial sequences, or regulatory sequences of the CA coding regions) can be administered in gene therapy applications, as is known in the art. These CA genes can include antisense applications, either as gene therapy (i.e. for incorporation into the genome) or as antisense compositions, as will be appreciated by those in the art.

[0264] Thus, in one embodiment, methods of modulating CA gene activity in cells or organisms are provided. In one embodiment, the methods comprise administering to a cell an anti-CA antibody that reduces or eliminates the biological activity of an endogenous CA protein. Alternatively, the methods comprise administering to a cell or organism a recombinant nucleic acid encoding a CA protein. As will be appreciated by those in the art, this may be accomplished in any number of ways. In a preferred embodiment, for example when the CA sequence is down-regulated in cancer, the activity of the CA gene product is increased by increasing the amount of CA expression in the cell, for example by overexpressing the endogenous CA gene or by administering a gene encoding the CA sequence, using known gene-therapy techniques. In a preferred embodiment, the gene therapy techniques include the incorporation of the exogenous gene using enhanced homologous recombination (EHR), for example as described in PCT/US93/03868, hereby incorporated by reference in its entirety. Alternatively, for example when the CA sequence is up-regulated in cancer, the activity of the endogenous CA gene is decreased, for example by the administration of a CA antisense nucleic acid.

[0265] (c) Vaccines

[0266] In a preferred embodiment, CA genes are administered as DNA vaccines, either single genes or combinations of CA genes. Naked DNA vaccines are generally known in the art. Brower, Nature Biotechnology, 16:1304-1305 (1998).

[0267] In one embodiment, CA genes of the present invention are used as DNA vaccines. Methods for the use of genes as DNA vaccines are well known to one of ordinary skill in the art, and include placing a CA gene or portion of a CA gene under the control of a promoter for expression in a patient with cancer. The CA gene used for DNA vaccines can encode full-length CA proteins, but more preferably encodes portions of the CA proteins including peptides derived from the CA protein. In a preferred embodiment a patient is immunized with a DNA vaccine comprising a plurality of nucleotide sequences derived from a CA gene. Similarly, it is possible to immunize a patient with a plurality of CA genes or portions thereof. Without being bound by theory, expression of the polypeptide encoded by the DNA vaccine, cytotoxic T-cells, helper T-cells and antibodies are induced that recognize and destroy or eliminate cells expressing CA proteins.

[0268] In a preferred embodiment, the DNA vaccines include a gene encoding an adjuvant molecule with the DNA vaccine. Such adjuvant molecules include cytokines that increase the immunogenic response to the CA polypeptide encoded by the DNA vaccine. Additional or alternative adjuvants are known to those of ordinary skill in the art and find use in the invention.

[0269] (d) Antibodies

[0270] In one embodiment, a cancer inhibitor is an antibody as discussed above. In one embodiment, the CA proteins of the present invention may be used to generate polyclonal and monoclonal antibodies to CA proteins, which are useful as described herein. Similarly, the CA proteins can be coupled, using standard technology, to affinity chromatography columns. These columns may then be used to purify CA antibodies. In a preferred embodiment, the antibodies are generated to epitopes unique to a CA protein; that is, the antibodies show little or no cross-reactivity to other proteins. These antibodies find use in a number of applications. For example, the CA antibodies may be coupled to standard affinity chromatography columns and used to purify CA proteins. The antibodies may also be used therapeutically as blocking polypeptides, as outlined above, since they will specifically bind to the CA protein.

[0271] The present invention further provides methods for detecting the presence of and/or measuring a level of a polypeptide in a biological sample, which CA polypeptide is encoded by a CA polynucleotide that is differentially expressed in a cancer cell, using an antibody specific for the encoded polypeptide. The methods generally comprise: a) contacting the sample with an antibody specific for a polypeptide encoded by a CA polynucleotide that is differentially expressed in a prostate cancer cell; and b) detecting binding between the antibody and molecules of the sample.

[0272] Detection of specific binding of the antibody specific for the encoded cancer-associated polypeptide, when compared to a suitable control is an indication that encoded polypeptide is present in the sample. Suitable controls include a sample known not to contain the encoded CA polypeptide or known not to contain elevated levels of the polypeptide; such as normal tissue, and a sample contacted with an antibody not specific for the encoded polypeptide, e.g., an anti-idiotype antibody. A variety of methods to detect specific antibody-antigen interactions are known in the art and can be used in the method, including, but not limited to, standard immunohistological methods, immunoprecipitation, an enzyme immunoassay, and a radioimmunoassay. In general, the specific antibody will be detectably labeled, either directly or indirectly. Direct labels include radioisotopes; enzymes whose products are detectable (e.g., luciferase, β-galactosidase, and the like); fluorescent labels (e.g., fluorescein isothiocyanate, rhodamine, phycoerythrin, and the like); fluorescence emitting metals, e.g., ¹⁵²Eu, or others of the lanthanide series, attached to the antibody through metal chelating groups such as EDTA; chemiluminescent compounds, e.g., luminol, isoluminol, acridinium salts, and the like; bioluminescent compounds, e.g., luciferin, aequorin (green fluorescent protein), and the like. The antibody may be attached (coupled) to an insoluble support, such as a polystyrene plate or a bead. Indirect labels include second antibodies specific for antibodies specific for the encoded polypeptide (“first specific antibody”), wherein the second antibody is labeled as described above; and members of specific binding pairs, e.g., biotin-avidin, and the like. The biological sample may be brought into contact with and immobilized on a solid support or carrier, such as nitrocellulose, that is capable of immobilizing cells, cell particles, or soluble proteins. The support may then be washed with suitable buffers, followed by contacting with a detectably-labeled first specific antibody. Detection methods are known in the art and will be chosen as appropriate to the signal emitted by the detectable label. Detection is generally accomplished in comparison to suitable controls, and to appropriate standards.

[0273] In some embodiments, the methods are adapted for use in vivo, e.g., to locate or identify sites where cancer cells are present. In these embodiments, a detectably-labeled moiety, e.g., an antibody, which is specific for a cancer-associated polypeptide is administered to an individual (e.g., by injection), and labeled cells are located using standard imaging techniques, including, but not limited to, magnetic resonance imaging, computed tomography scanning, and the like. In this manner, cancer cells are differentially labeled.

[0274] (e) Detection and Diagnosis of Cancers

[0275] Without being bound by theory, it appears that the various CA sequences are important in cancers. Accordingly, disorders based on mutant or variant CA genes may be determined. In one embodiment, the invention provides methods for identifying cells containing variant CA genes comprising determining all or part of the sequence of at least one endogenous CA genes in a cell. As will be appreciated by those in the art, this may be done using any number of sequencing techniques. In a preferred embodiment, the invention provides methods of identifying the CA genotype of an individual comprising determining all or part of the sequence of at least one CA gene of the individual. This is generally done in at least one tissue of the individual, and may include the evaluation of a number of tissues or different samples of the same tissue. The method may include comparing the sequence of the sequenced CA gene to a known CA gene, i.e., a wild-type gene. As will be appreciated by those in the art, alterations in the sequence of some CA genes can be an indication of either the presence of the disease, or propensity to develop the disease, or prognosis evaluations.

[0276] The sequence of all or part of the CA gene can then be compared to the sequence of a known CA gene to determine if any differences exist. This can be done using any number of known homology programs, such as Bestfit, etc. In a preferred embodiment, the presence of a difference in the sequence between the CA gene of the patient and the known CA gene is indicative of a disease state or a propensity for a disease state, as outlined herein.

[0277] In a preferred embodiment, the CA genes are used as probes to determine the number of copies of the CA gene in the genome. For example, some cancers exhibit chromosomal deletions or insertions, resulting in an alteration in the copy number of a gene.

[0278] In another preferred embodiment CA genes are used as probes to determine the chromosomal location of the CA genes. Information such as chromosomal location finds use in providing a diagnosis or prognosis in particular when chromosomal abnormalities such as translocations, and the like are identified in CA gene loci.

[0279] The present invention provides methods of using the polynucleotides described herein for detecting cancer cells, facilitating diagnosis of cancer and the severity of a cancer (e.g., tumor grade, tumor burden, and the like) in a subject, facilitating a determination of the prognosis of a subject, and assessing the responsiveness of the subject to therapy (e.g., by providing a measure of therapeutic effect through, for example, assessing tumor burden during or following a chemotherapeutic regimen). Detection can be based on detection of a polynucleotide that is differentially expressed in a cancer cell, and/or detection of a polypeptide encoded by a polynucleotide that is differentially expressed in a cancer cell. The detection methods of the invention can be conducted in vitro or in vivo, on isolated cells, or in whole tissues or a bodily fluid e.g., blood, plasma, serum, urine, and the like).

[0280] In some embodiments, methods are provided for detecting a cancer cell by detecting expression in the cell of a transcript that is differentially expressed in a cancer cell. Any of a variety of known methods can be used for detection, including, but not limited to, detection of a transcript by hybridization with a polynucleotide that hybridizes to a polynucleotide that is differentially expressed in a prostate cancer cell; detection of a transcript by a polymerase chain reaction using specific oligonucleotide primers; in situ hybridization of a cell using as a probe a polynucleotide that hybridizes to a gene that is differentially expressed in a prostate cancer cell. The methods can be used to detect and/or measure mRNA levels of a gene that is differentially expressed in a cancer cell. In some embodiments, the methods comprise: a) contacting a sample with a polynucleotide that corresponds to a differentially expressed gene described herein under conditions that allow hybridization; and b) detecting hybridization, if any.

[0281] Detection of differential hybridization, when compared to a suitable control, is an indication of the presence in the sample of a polynucleotide that is differentially expressed in a cancer cell. Appropriate controls include, for example, a sample that is known not to contain a polynucleotide that is differentially expressed in a cancer cell, and use of a labeled polynucleotide of the same “sense” as the polynucleotide that is differentially expressed in the cancer cell. Conditions that allow hybridization are known in the art, and have been described in more detail above. Detection can also be accomplished by any known method, including, but not limited to, in situ hybridization, PCR (polymerase chain reaction), RT-PCR (reverse transcription-PCR), TMA, bDNA, and Nasbau and “Northern” or RNA blotting, or combinations of such techniques, using a suitably labeled polynucleotide. A variety of labels and labeling methods for polynucleotides are known in the art and can be used in the assay methods of the invention. Specificity of hybridization can be determined by comparison to appropriate controls.

[0282] Polynucleotides generally comprising at least 10 nucleotides (nt), at least 12 nt or at least 15 contiguous nucleotides of a polynucleotide provided herein, such as, for example, those having the sequence as depicted in Tables 1-13, are used for a variety of purposes, such as probes for detection of and/or measurement of, transcription levels of a polynucleotide that is differentially expressed in a prostate cancer cell. As will be readily appreciated by the ordinarily skilled artisan, the probe can be detectably labeled and contacted with, for example, an array comprising immobilized polynucleotides obtained from a test sample (e.g., mRNA). Alternatively, the probe can be immobilized on an array and the test sample detectably labeled. These and other variations of the methods of the invention are well within the skill in the art and are within the scope of the invention.

[0283] Nucleotide probes are used to detect expression of a gene corresponding to the provided polynucleotide. In Northern blots, mRNA is separated electrophoretically and contacted with a probe. A probe is detected as hybridizing to an mRNA species of a particular size. The amount of hybridization can be quantitated to determine relative amounts of expression, for example under a particular condition. Probes are used for in situ hybridization to cells to detect expression. Probes can also be used in vivo for diagnostic detection of hybridizing sequences. Probes are typically labeled with a radioactive isotope. Other types of detectable labels can be used such as chromophores, fluorophores, and enzymes. Other examples of nucleotide hybridization assays are described in WO92/02526 and U.S. Pat. No. 5,124,246.

[0284] PCR is another means for detecting small amounts of target nucleic acids (see, e.g., Mullis et al., Meth. Enzymol. (1987) 155:335; U.S. Pat. No. 4,683,195; and U.S. Pat. No. 4,683,202). Two primer oligonucleotides that hybridize with the target nucleic acids are used to prime the reaction. The primers can be composed of sequence within or 3′ and 5′ to the CA polynucleotides disclosed herein. Alternatively, if the primers are 3′ and 5′ to these polynucleotides, they need not hybridize to them or the complements. After amplification of the target with a thermostable polymerase, the amplified target nucleic acids can be detected by methods known in the art, e.g., Southern blot. mRNA or cDNA can also be detected by traditional blotting techniques (e.g., Southern blot, Northern blot, etc.) described in Sambrook et al., “Molecular Cloning: A Laboratory Manual” (New York, Cold Spring Harbor Laboratory, 1989) (e.g., without PCR amplification). In general, mRNA or cDNA generated from mRNA using a polymerase enzyme can be purified and separated using gel electrophoresis, and transferred to a solid support, such as nitrocellulose. The solid support is exposed to a labeled probe, washed to remove any unhybridized probe, and duplexes containing the labeled probe are detected.

[0285] Methods using PCR amplification can be performed on the DNA from a single cell, although it is convenient to use at least about 10⁵ cells. The use of the polymerase chain reaction is described in Saiki et al. (1985) Science 239:487, and a review of current techniques may be found in Sambrook, et al. Molecular Cloning: A Laboratory Manual, CSH Press 1989, pp. 14.2-14.33. A detectable label may be included in the amplification reaction. Suitable detectable labels include fluorochromes, (e.g. fluorescein isothiocyanate (FITC), rhodamine, Texas Red, phycoerythrin, allophycocyanin, 6-carboxyfluorescein (6-FAM), 2′,7′-dimethoxy-4′,5′-dichloro-6-carboxyfluorescein, 6-carboxy-X-rhodamine (ROX), 6-carboxy-2′,4′,7′,4,7-hexachlorofluorescein (HEX), 5-carboxyfluorescein (5-FAM) or N,N,N′,N′-tetramethyl-6-carboxyrhodamine (TAMRA)), radioactive labels, (e.g. ³²P, ³⁵S, ³H, etc.), and the like. The label may be a two stage system, where the polynucleotides is conjugated to biotin, haptens, etc. having a high affinity binding partner, e.g. avidin, specific antibodies, etc., where the binding partner is conjugated to a detectable label. The label may be conjugated to one or both of the primers. Alternatively, the pool of nucleotides used in the amplification is labeled, so as to incorporate the label into the amplification product.

[0286] The detection methods can be provided as part of a kit. Thus, the invention further provides kits for detecting the presence and/or a level of a polynucleotide that is differentially expressed in a cancer cell (e.g., by detection of an mRNA encoded by the differentially expressed gene of interest), and/or a polypeptide encoded thereby, in a biological sample. Procedures using these kits can be performed by clinical laboratories, experimental laboratories, medical practitioners, or private individuals. The kits of the invention for detecting a polypeptide encoded by a polynucleotide that is differentially expressed in a cancer cell may comprise a moiety that specifically binds the polypeptide, which may be an antibody that binds the polypeptide or fragment thereof. The kits of the invention used for detecting a polynucleotide that is differentially expressed in a prostate cancer cell may comprise a moiety that specifically hybridizes to such a polynucleotide. The kit may optionally provide additional components that are useful in the procedure, including, but not limited to, buffers, developing reagents, labels, reacting surfaces, means for detection, control samples, standards, instructions, and interpretive information. Accordingly, the present invention provides kits for detecting prostate cancer comprising at least one of polynucleotides having the sequence as shown in Tables 1-13 or fragments thereof.

[0287] The present invention further relates to methods of detecting/diagnosing a neoplastic or preneoplastic condition in a mammal (for example, a human). “Diagnosis” as used herein generally includes determination of a subject's susceptibility to a disease or disorder, determination as to whether a subject is presently affected by a disease or disorder, prognosis of a subject affected by a disease or disorder (e.g., identification of pre-metastatic or metastatic cancerous states, stages of cancer, or responsiveness of cancer to therapy), and therametrics (e.g., monitoring a subject's condition to provide information as to the effect or efficacy of therapy).

[0288] The terms “treatment”, “treating”, “treat” and the like are used herein to generally refer to obtaining a desired pharmacologic and/or physiologic effect. The effect may be prophylactic in terms of completely or partially preventing a disease or symptom thereof and/or may be therapeutic in terms of a partial or complete stabilization or cure for a disease and/or adverse effect attributable to the disease. “Treatment” as used herein covers any treatment of a disease in a mammal, particularly a human, and includes: (a) preventing the disease or symptom from occurring in a subject which may be predisposed to the disease or symptom but has not yet been diagnosed as having it; (b) inhibiting the disease symptom, i.e., arresting its development; or (c) relieving the disease symptom, i.e., causing regression of the disease or symptom.

[0289] An “effective amount” is an amount sufficient to effect beneficial or desired results, including clinical results. An effective amount can be administered in one or more administrations.

[0290] A “cell sample” encompasses a variety of sample types obtained from an individual and can be used in a diagnostic or monitoring assay. The definition encompasses blood and other liquid samples of biological origin, solid tissue samples such as a biopsy specimen or tissue cultures or cells derived therefrom, and the progeny thereof. The definition also includes samples that have been manipulated in any way after their procurement, such as by treatment with reagents, solubilization, or enrichment for certain components, such as proteins or polynucleotides. The term “cell sample” encompasses a clinical sample, and also includes cells in culture, cell supernatants, cell lysates, serum, plasma, biological fluid, and tissue samples.

[0291] As used herein, the terms “neoplastic cells”, “neoplasia”, “tumor”, “tumor cells”, “cancer” and “cancer cells”, (used interchangeably) refer to cells which exhibit relatively autonomous growth, so that they exhibit an aberrant growth phenotype characterized by a significant loss of control of cell proliferation (i.e., de-regulated cell division). Neoplastic cells can be malignant or benign.

[0292] The terms “individual,” “subject,” “host,” and “patient,” are used interchangeably herein and refer to any mammalian subject for whom diagnosis, treatment, or therapy is desired, particularly humans. Other subjects may include cattle, dogs, cats, guinea pigs, rabbits, rats, mice, horses, and so on. Examples of conditions that can be detected/diagnosed in accordance with these methods include cancers. Polynucleotides corresponding to genes that exhibit the appropriate expression pattern can be used to detect cancer in a subject. For a review of markers of cancer, see, e.g., Hanahan et al. Cell 100:57-70 (2000).

[0293] One detection/diagnostic method comprises: (a) obtaining from a mammal (e.g., a human) a biological sample, (b) detecting the presence in the sample of a CA protein and (c) comparing the amount of product present with that in a control sample. In accordance with this method, the presence in the sample of elevated levels of a CA gene product indicates that the subject has a neoplastic or preneoplastic condition.

[0294] Biological samples suitable for use in this method include biological fluids such as serum, plasma, pleural effusions, urine and cerebro-spinal fluid, CSF, tissue samples (e.g., mammary tumor or prostate tissue slices) can also be used in the method of the invention, including samples derived from biopsies. Cell cultures or cell extracts derived, for example, from tissue biopsies can also be used.

[0295] The compound is preferably a binding protein, e.g., an antibody, polyclonal or monoclonal, or antigen binding fragment thereof, which can be labeled with a detectable marker (e.g., fluorophore, chromophore or isotope, etc). Where appropriate, the compound can be attached to a solid support such as a bead, plate, filter, resin, etc. Determination of formation of the complex can be performed by contacting the complex with a second compound (e.g., an antibody) that specifically binds to the first compound (or complex). Like the first compound, the further compound can be attached to a solid support and/or can be labeled with a detectable marker.

[0296] The identification of elevated levels of CA protein in accordance with the present invention makes possible the identification of subjects (patients) that are likely to benefit from adjuvant therapy. For example, a biological sample from a post primary therapy subject (e.g., subject having undergone surgery) can be screened for the presence of circulating CA protein, the presence of elevated levels of the protein, determined by studies of normal populations, being indicative of residual tumor tissue. Similarly, tissue from the cut site of a surgically removed tumor can be examined (e.g., by immunofluorescence), the presence of elevated levels of product (relative to the surrounding tissue) being indicative of incomplete removal of the tumor. The ability to identify such subjects makes it possible to tailor therapy to the needs of the particular subject. Subjects undergoing non-surgical therapy, e.g., chemotherapy or radiation therapy, can also be monitored, the presence in samples from such subjects of elevated levels of CA protein being indicative of the need for continued treatment. Staging of the disease (for example, for purposes of optimizing treatment regimens) can also be effected, for example, by biopsy e.g., with antibody specific for a CA protein.

[0297] (f) Animal Models and Transgenics

[0298] In another preferred embodiment CA genes find use in generating animal models of cancers, particularly lymphomas and carcinomas. As is appreciated by one of ordinary skill in the art, when the CA gene identified is repressed or diminished in CA tissue, gene therapy technology wherein antisense RNA directed to the CA gene will also diminish or repress expression of the gene. An animal generated as such serves as an animal model of CA that finds use in screening bioactive drug candidates. Similarly, gene knockout technology, for example as a result of homologous recombination with an appropriate gene targeting vector, will result in the absence of the CA protein. When desired, tissue-specific expression or knockout of the CA protein may be necessary.

[0299] It is also possible that the CA protein is overexpressed in cancer. As such, transgenic animals can be generated that overexpress the CA protein. Depending on the desired expression level, promoters of various strengths can be employed to express the transgene. Also, the number of copies of the integrated transgene can be determined and compared for a determination of the expression level of the transgene. Animals generated by such methods find use as animal models of CA and are additionally useful in screening for bioactive molecules to treat cancer.

[0300] Characterization of CA Sequences

[0301] The CA nucleic acid sequences of the invention are depicted in Tables 1-13. The sequences in each Table include genomic DNA sequence (mD U-001 through mD U-013; hD U-001 through hD U-013), coding sequence corresponding to the mRNA (mR U-001 through mR U-013; hR U-001 through hR U-013) and amino acid sequences of the proteins (mP U-001 through mP U-013; hP U-001 through hP U-013) encoded by the mRNA for both mouse and human genes. N/A indicates a gene that has been identified, but for which there has not been a name ascribed.

[0302] Expression of the genes encoded by hR U-001 through hR U-013 are found to be dys-regulated in one or more types of cancer tissue in relation to their expression levels in normal tissue. The tissue type and the cancer tissue in which dysregulation of these novel genes is observed is shown in Table 14. The nature of dys-regulation (up or down) and incidence in the cancer tissue examined are also shown in Table 14. The dysregulated genes express mRNAs corresponding to hR U-001 through hR U-013 which encode the proteins hP U-001 through hP U-013. Dysregulations are observed at the mRNA and/or protein levels.

TABLE 14

| HUMAN CODING | | | DYS- | |
|---|---|---|---|---|
| SEQUENCE | TISSUE | DESCRIPTION | REGULATION | INCIDENCE |
| hR U-001 | Lung | T2 NO STAGE 1 | UP | 1/10 |
| (SEQ ID NO: 5) | Breast | Ductal Adenocarcinoma | | 10/38 |
| | Liver | Adenocarcinoma | | 4/17 |
| | Bladder | T2-4 | | 3/17 |
| | Cervix | Squamous cell carcinoma | | 2/23 |
| hR U-002 | Liver | Adenocarcinoma | UP | 2/17 |
| (SEQ ID NO: 11) | Kidney | Renal cell carcinoma | | 3/12 |
| | Colon | Adenocarcinoma | | 3/28 |
| | Breast | Ductal Adenocarcinoma | | 2/49 |
| hR U-003 | Liver | Adenocarcinoma | UP | 8/17 |
| (SEQ ID NO: 17) | Kidney | Renal cell carcinoma | | 2/12 |
| | Colon | Adenocarcinoma | | 7/25 |
| | Cervix | Squamous cell carcinoma | | 2/24 |
| hR U-004 | Leukemia/ | N/A | UP | 2/32 |
| (SEQ ID NO: 23) | Lymphoma | | | |
| hR U-005 | Colon | Adenocarcinoma polyps | UP | 3/18 |
| (SEQ ID NO: 29) | | | | |
| hR U-006 | Prostate | T1 NO STAGE1 GLEASON | UP | 1/8 |
| (SEQ ID NO: 35) | Lung | SCORE 7 | | 2/8 |
| | Bladder | T2 NO STAGE1 | | 2/17 |
| | Breast | T2-4 | | 3/41 |
| | Colon | Ductal Adenocarcinoma | | 2/20 |
| | | Adenocarcinoma | | |
| hR U-007 | Kidney | Renal cell carcinoma | UP | 1/12 |
| (SEQ ID NO: 41) | | | | |
| hR U-007.1 | | | | |
| (SEQ ID NO: 43) | | | | |
| hR U-007.2 | | | | |
| (SEQ ID NO: 45) | | | | |
| hR U-008 | Colon | Adenocarcinoma polyps | UP | 2/18 |
| (SEQ ID NO: 51) | Liver | Adenocarcinoma | | 3/17 |
| hR U-009 | Leukemia/ | N/A | UP | 4/32 |
| (SEQ ID NO: 57) | Lymphoma | | | |
| hR U-009.1 | | | | |
| (SEQ ID NO: 59) | | | | |
| hR U-010 | Kidney | Renal cell carcinoma | UP | 2/12 |
| (SEQ ID NO: 65) | Cervix | Squamous cell carcinoma | | 2/24 |
| | Colon | Adenocarcinoma | | 2/21 |
| | Bladder | T2-4 | | 1/17 |
| | Breast | Ductal Adenocarcinoma | | 8/42 |
| hR U-011 | Breast | Ductal Adenocarcinoma | UP | 4/49 |
| (SEQ ID NO: 71) | | | | |
| hR U-012 | Kidney | Renal cell carcinoma | UP | 2/12 |
| (SEQ ID NO: 77) | | | | |
| hR U-012.1 | | | | |
| (SEQ ID NO: 79) | | | | |
| hR U-013 | Colon | Adenocarcinoma | UP | 7/19 |
| (SEQ ID NO: 85) | Bladder | T2-4 | | 4/17 |

[0303] The CA sequences were analyzed by Panther™ (Molecular Diagnostics, Palo Alto, Calif.) software designed to detect homologs and enable prediction of molecular function through a system for protein functional classification. Human Gene Ontlogy annotations were prepared in accordance with the Gene Ontology Consortium (Gene Ontology: tool for the unification of biology. The Gene Ontology Consortium Nature Genet. 25: 25-29 (2000)). Similar analysis was carried out by determining IPR information regarding the CA polypeptides from InterPro, which is an integrated documentation resource for protein families, domains and functional sites (Apweiler at al. Bioinformatics 16(12):1145-1150 (2000)).

[0304] The CA sequences may be classified according to the following predicted general classifications of function by Panther™ analysis, homology and IPR domain information for polypeptides hP U-001 through hP U-013 as shown below in Table 15.

TABLE 15

| PROTEIN | CLASSIFICATION | PANTHER | IPR DOMAIN | HOMOLOG |
|---|---|---|---|---|
| hP U-001 | Signaling protein | Cf10857 copine- | IPR000008 C2 domain; | CPNE7-Copine |
| (SEQ ID NO: 6) | | related | IPR001128 | family |
| | | | Cytochrome P450; | |
| | | | IPR001993 | |
| | | | Mitochondrial substrate | |
| | | | carrier | |
| hP U-002 | Growth factor | Cf12113 lens | N/A | DKK3- |
| (SEQ ID NO: 12) | | fiber protein | | Dickkopf |
| | | clfest4-related | | family |
| hP U-003 | Cell adhesion | None | IPR000884 | C20orf182- |
| (SEQ ID NO: 18) | | | Thrombospondin, type | Non- |
| | | | I; IPR002174 Furin-like | thrombospondin |
| | | | cysteine rich region | TSR family (F- |
| | | | | spondin like) |
| hP U-004 | Transcription factor | Cf11389 | IPR000822 Zn-finger, | HIVEP1-human |
| (SEQ ID NO: 24) | | krueppel family | C2H2 type | immunodeficiency |
| | | c2h2-type zinc | | virus type I |
| | | finger protein | | enhancer |
| | | | | binding protein |
| | | | | family |
| hP U-005 | Transporter and | Mucolipin 1- | IPR002111 Cation (not | MCOLN1- |
| (SEQ ID NO: 30) | channel | related | K+) channel, TM | Mucolipin |
| | | | region; IPR000636 | family |
| | | | Cation channel, non- | |
| | | | ligand gated | |
| hP U-006 | Unknown | None | N/A | TM4SF5- |
| (SEQ ID NO: 36) | | | | Tetraspan |
| | | | | tumor antigen |
| | | | | family |
| hP U-007 | Signaling protein | None | N/A | N/A |
| (SEQ ID NO: 42) | | | | |
| hP U-007.1 | | | | |
| (SEQ ID NO: 44) | | | | |
| hP U-007.2 | | | | |
| (SEQ ID NO: 46) | | | | |
| hP U-008 | Transcription factor | Cf11389 | IPR000210 BTB/POZ | Kelch-related |
| (SEQ ID NO: 52) | | krueppel family | domain; IPR001472 | family |
| | | c2h2-type zinc | Bipartite nuclear | |
| | | finger protein | localization signal; | |
| | | | IPR000694 Proline-rich | |
| | | | region; IPR000822 Zn- | |
| | | | finger, C2H2 type | |
| hP U-009 | Signaling protein | Cf11554 wd | IPR001680 G-protein | N/A |
| (SEQ ID NO: 58) | | domain- | beta WD-40 repeat | |
| hP U-009.1 | | containing | | |
| (SEQ ID NO: 60) | | protein | | |
| hP U-010 | Cell adhesion | Cf10274 | IPR002181 Fibrinogen | TNR-Tenascin |
| (SEQ ID NO: 66) | | tenascin/ | beta and gamma chains | family |
| | | fibronectin | C-terminal globular | |
| | | | domain; IPR003961 | |
| | | | Fibronectin type III | |
| | | | domain; IPR000561 | |
| | | | EGF-like domain; | |
| | | | IPR000834 Zinc | |
| | | | carboxypeptidase A | |
| | | | metalloprotease (M14) | |
| hP U-011 | Development | Cf10383 | IPR005016 TMS | TDE1- |
| (SEQ ID NO: 72) | | membrane | membrane | Testicular |
| | | protein tms | protein/tumor | tumor |
| | | | differentially expressed | differentially |
| | | | protein | expressed gene |
| | | | | family |
| hP U-012 | Signaling protein; | Cf10222 | IPR002110 Ankyrin- | BCL-3- |
| (SEQ ID NO: 78) | transcription factor | rel/dorsal | repeat | REL/DORSAL/ |
| hP U-012.1 | | transcription | | NF-KB |
| (SEQ ID NO: 80) | | factor-related | | transcription |
| | | | | factor family |
| hP U-013 | Unknown | None | N/A | N/A |
| (SEQ ID NO: 86) | | | | |

[0305] Table 16 shows the locations of expression of CA proteins—intracellular or extracellular—and also the tissues where the CA proteins are expressed. The tissue-specific localization of the CA proteins according to the Cancer Genome Anatomy Project (http://cgap.nci.nih.gov/Catalog) is shown in Table 16.

TABLE 16

| PROTEIN | LOCATION | CGAP-EXPRESSION |
|---|---|---|
| hP U-001 | Intracellular | bone marrow, brain, cerebrum, endocrine, eye, fetus, |
| (SEQ ID NO: 6) | | gastrointestinal tract, genitourinary, kidney, lung, nervous, |
| | | pancreatic islet, prostate, stomach, testis, uncharacterized tissue |
| hP U-002 | Extracellular | brain, eye, fetus, genitourinary, germ cell, nervous, retina, testis, |
| (SEQ ID NO: 12) | | uncharacterized tissue, whole blood, whole body |
| hP U-003 | Extracellular | B-cell, brain, cerebrum, colon, endocrine, fetus, gastrointestinal |
| (SEQ ID NO: 18) | | tract, genitourinary, heart, kidney, lung, nervous, ovary, |
| | | parathyroid, placenta, pooled tissue, prostate, skin, soft tissue, |
| | | stomach, testis, uncharacterized tissue, uterus, whole body |
| hP U-004 | Intracellular | N/A |
| (SEQ ID NO: 24) | | |
| hP U-005 | Intracellular | adrenal cortex, brain, endocrine, fetus, genitourinary, heart, kidney, |
| (SEQ ID NO: 30) | | lung, mammary gland, nervous, ovary, pancreatic islet, parathyroid, |
| | | placenta, pooled tissue, skin, uncharacterized tissue, uterus |
| hP U-006 | Unknown | colon, gastrointestinal tract, genitourinary, kidney, pooled tissue, |
| (SEQ ID NO: 36) | | stomach, whole blood |
| hP U-007 | Intracellular | B-cell, bone, bone marrow, brain, cerebellum, cervix, colon, |
| (SEQ ID NO: 42) | | endocrine, eye, fetus, gastrointestinal tract, genitourinary, germ |
| hP U-007.1 | | cell, head and neck, heart, kidney, liver, lung, lymph node, |
| (SEQ ID NO: 44) | | mammary gland, muscle, nervous, ovary, pancreas, pancreatic islet, |
| hP U-007.2 | | parathyroid, peripheral nervous system, placenta, pooled tissue, |
| (SEQ ID NO: 46) | | prostate, retina, salivary gland, skin, spleen, stomach, T-cell, testis, |
| | | thyroid, uncharacterized tissue, uterus, whole blood, whole body |
| hP U-008 | Intracellular | adrenal cortex, B-cell, bone, brain, endocrine, eye, fetus, |
| (SEQ ID NO: 52) | | gastrointestinal tract, genitourinary, heart, kidney, lung, lymph |
| | | node, muscle, nervous, ovary, pancreatic islet, parathyroid, |
| | | peripheral nervous system, placenta, pooled tissue, prostate, retina, |
| | | skin, stomach, testis, uncharacterized tissue, uterus, vascular, whole |
| | | blood |
| hP U-009 | Intracellular | adrenal cortex, B-cell, bone, bone marrow, brain, cervix, colon, |
| (SEQ ID NO: 58) | | endocrine, eye, fetus, gastrointestinal tract, genitourinary, germ |
| hP U-009.1 | | cell, head and neck, kidney, liver, lung, lymph node, mammary |
| (SEQ ID NO: 60) | | gland, muscle, nervous, ovary, pancreatic islet, parathyroid, |
| | | peripheral nervous system, placenta, pooled tissue, prostate, retina, |
| | | salivary gland, skin, spleen, stomach, testis, thyroid, |
| | | uncharacterized tissue, uterus, whole blood |
| hP U-010 | Extracellular | endocrine, eye, fetus, genitourinary, heart, mammary gland, ovary, |
| (SEQ ID NO: 66) | | parathyroid, placenta, pooled tissue, retina, skin, uterus, whole |
| | | body |
| hP U-011 | Surface | N/A |
| (SEQ ID NO: 72) | | |
| hP U-012 | Intracellular | B-cell, bone, bone marrow, brain, colon, endocrine, esophagus, |
| (SEQ ID NO: 78) | | eye, fetus, gastrointestinal tract, genitourinary, head and neck, |
| hP U-012.1 | | heart, kidney, liver, lung, lymph node, mammary gland, muscle, |
| (SEQ ID NO: 80) | | nervous, ovary, pancreas, pancreatic islet, parathyroid, pituitary |
| | | gland, placenta, pooled tissue, skin, spleen, stomach, testis, thyroid, |
| | | uncharacterized tissue, uterus, whole blood |
| hP U-013 | Unknown | B-cell, bone marrow, brain, cerebrum, cervix, colon, ear, |
| (SEQ ID NO: 86) | | endocrine, eye, fetus, gastrointestinal tract, genitourinary, germ |
| | | cell, head and neck, heart, kidney, liver, lung, lymph node, |
| | | mammary gland, nervous, ovary, pancreas, pancreatic islet, |
| | | parathyroid, peripheral nervous system, placenta, pooled tissue, |
| | | prostate, retina, salivary gland, skin, spleen, stomach, T-cell, testis, |
| | | thyroid, uncharacterized tissue, uterus, vascular, whole body |

[0306] A CA protein (CAP) is modulated by a drug candidate, bioactive agent or CAP inhibitor, that is an inhibitor of transcription wherein the CAP sequence is selected from the group consisting of hP U-004, hP U-008, hP U-012, and hP U-012.1.

[0307] A CA protein (CAP) is modulated by a drug candidate, bioactive agent or CAP inhibitor, that is a growth factor wherein the CAP sequence is hP U-002.

[0308] A CA protein (CAP) is modulated by a drug candidate, bioactive agent or CAP inhibitor, that is a signalling protein wherein the CAP sequence is selected from the group consisting of hP U-001, hP U-007, hP U-007.1, hP U-007.2, hP U-009, hP U-009.1, hP U-012, and hP U-012.1.

[0309] A CA protein (CAP) is modulated by a drug candidate, bioactive agent or CAP inhibitor, that is a cell adhesion protein wherein the CAP sequence is selected from the group consisting of hP U-003 and hP U-010.

[0310] A CA protein (CAP) hP U-011 is expressed on a cell surface.

[0311] Certain aspects of the present invention are described in greater detail in the non-limiting examples that follow.

### EXAMPLES

[0312] The following examples are put forth so as to provide those of ordinary skill in the art with a complete disclosure and description of how to make and use the present invention, and are not intended to limit the scope of what the inventors regard as their invention nor are they intended to represent that the experiments below are all and only experiments performed. Efforts have been made to ensure accuracy with respect to numbers used (e.g. amounts, temperature, etc.) but some experimental errors and deviations should be accounted for. Unless indicated otherwise, parts are parts by weight, molecular weight is weight average molecular weight, temperature is in degrees Celsius, and pressure is at or near atmospheric.

### Example 1

### Insertion Site Analysis Following Tumor Induction in Mice

[0313] Tumors are induced in mice using either mouse mammary tumor virus (MMTV) or murine leukemia virus (MLV). MMTV causes mammary adenocarcinomas and MLV causes a variety of different hematopoetic malignancies (primarily T- or B-cell lymphomas). Three routes of infection are used: (1) injection of neonates with purified virus preparations, (2) infection by milk-borne virus during nursing, and (3) genetic transmission of pathogenic proviruses via the germ-line (Akvr1 and/or Mtv2). The type of malignancy present in each affected mouse is determined by histological analysis of H&E-stained thin sections of formalin-fixed, paraffin-embedded biopsy samples. Host DNA sequences flanking all clonally-integrated proviruses in each tumor are recovered by nested anchored-PCR using two virus-specific primers and two primers specific for a 40 bp double stranded DNA anchor ligated to restriction enzyme digested tumor DNA. Amplified bands representing host/virus junction fragments are cloned and sequenced. Then the host sequences (called “tags”) are used to BLAST analyze the Celera mouse genomic sequence. For each individual tag, three parameters are recorded: (1) the mouse chromosome assignment, (2) base pair coordinates at which the integration occurred, and (3) provirus orientation. Using this information, all available tags from all analyzed tumors are mapped to the mouse genome. To identify the protooncogene targets of provirus insertion mutation, the provirus integration pattern at each cluster of integrants is analyzed relative to the locations of all known genes in the transcriptome. The presence of provirus at the same locus in two or more independent tumors is prima facie evidence that a protooncogene is present at or very near the proviral integration sites. This is because the genome is too large for random integrations to result in observable clustering. Any clustering that is detected is unequivocal evidence for biological selection during tumorigenesis. In order to identify the human orthologs of the protooncogene targets of provirus insertion mutation, a comparative analysis of syntenic regions of the mouse and human genomes is performed.

[0314] An example of PCR amplification of host/virus junction fragments is presented in FIG. 1. Lane 1 contains the amplification products from normal control DNA and lane 2 contains the amplification products from tumor DNA. The bands result from 5′ host/virus junction fragments present in the DNA samples. Lane 1 has bands from the env/3′ LTR junctions from all proviruses (upper) and the host/5′ LTR from the pathogenic endogenous Mtv2 provirus present in this particular mouse strain. This endogenous provirus is detected because its sequence is identical to the new clonally integrated proviruses in the tumor. All four new clonally integrated proviruses known to be in this tumor are readily detected.

### Example 2

### Analysis of Quantitative RT-PCR: Comparative C_{T} Method.

[0315] The expression level of target genes is quantified using the ABI PRISM 7900HT Sequence Detection System (Applied Biosystems, California). The method is based on the quantitation of the initial copy number of target template in comparison to that of a reference (normalizer) housekeeper gene (Pre-Developed TaqMan® Assay Reagents Gene Expression Quantification Protocol, Applied Biosystems, 2001). Accumulation of DNA product with each PCR cycle is related to amplicon efficiency and the initial template concentration. Therefore the amplification efficiency of both the target and the normalizer must be approximately equal. The threshold cycle (C_{T}), which is dependent on the starting template copy number and the DNA amplification efficiency, is a PCR cycle during which PCR product growth is exponential. With a similar dynamic range for the target and normalizer, the comparative C_{T} method is applicable.

[0316] An example of the comparative C_{T} method of gene expression for quantitative RT-PCR is shown in Chart 2. In the first step, assays are performed in quadruplicate on a normal tissue and several sample tissues. In these tissues, the means and standard deviations of C_{T} values are determined for housekeeper genes (chosen as controls if shown to be biologically stable among various samples, irrespective of disease state) and for the target gene. Chart 2 shows an example of average C_{T} values for a housekeeper gene and target gene. These values can fall within a range from upper teens to 40 depending on the intrinsic expression level of the gene in the particular tissue. The coefficient of variance of all replicate sets cannot exceed 1.5%.

[0317] An assessment of how the ΔC_{T} changes with template dilution verifies that the efficiencies of the target and housekeeper amplicons are approximately equal if the log input amount of template RNA versus ΔC_{T} plot has a slope <0.10. With the relative efficiencies verified for target and housekeeper, the ΔΔC_{T} comparative calculation becomes valid, as mentioned above. An example of the calculated difference between the C_{T} values of target and housekeeper genes (ΔC_{T}) for various samples is shown in Chart 3. The ΔΔC_{T} is calculated for each sample by subtracting its ΔC_{T} value from the ΔC_{T} value of the baseline (calibrator) sample. If the expression is increased in some samples and decreased in others, ΔΔC_{T} will be a mixture of negative and positive values. The final step in the calculation is to transform these values to absolute values. The formula for this is:

Comparative expression level=2^{-ΔΔCT}

[0318] The final value for the calibrator should always be one. Chart 4 shows the ΔΔC_{T} and comparative expression level for each sample from Chart 3.

CHART 2
Average Ct

| Sample | Housekeeper | Target |
|---|---|---|
| Human Genomic_clontech | 23.40229767 | 24.718297 |
| Malignant mammary adenocarcinoma pleural | 24.57459367 | 25.62105175 |
| effusion | | |
| Mammary ductal carcinoma plueral | 23.935565 | 25.064095 |
| effusion | | |
| Mammary ductal carcinoma_human_45537 | 24.06496275 | 24.8361145 |
| Mammary ductal carcinoma_human_45523 | 24.286542 | 25.59857167 |
| Mammary ductal carcinoma_human_45535 | 24.271219 | 25.62112767 |
| transformed primary embryonal | 24.136573 | 25.86051867 |
| kidney_human | | |

[0319] CHART 3
Target Normalized with Housekeeper

| Sample | ΔCt | Stdev (ΔCt) |
|---|---|---|
| Human Genomic_clontech (Calibrator) | 1.69 | 0.22 |
| Malignant mammary adenocarcinoma pleural | −1.85 | 0.14 |
| effusion | | |
| Mammary ductal carcinoma plueral effusion | 1.12 | 0.24 |
| Mammary ductal carcinoma_human_45537 | 1.02 | 0.16 |
| Mammary ductal carcinoma_human_45523 | 0.49 | 0.26 |
| Mammary ductal carcinoma_human_45535 | 1.03 | 0.18 |
| transformed primary embryonal kidney_human | 1.81 | 0.15 |

[0320] CHART 4
Target Normalized with Housekeeper

| | | Stdev | | | Comparative |
|---|---|---|---|---|---|
| Sample | ΔCt | (ΔCt) | ΔΔCt | Stdev (ΔΔCt) | expression level |
| Human Genomic_clontech (Calibrator) | 1.69 | 0.22 | 0 | 0.22 | 1 |
| Malignant mammary adenocarcinoma pleural | −1.85 | 0.14 | −3.54 | 0.14 | 11.60 |
| effusion | | | | | |
| Mammary ductal carcinoma plueral effusion | 1.12 | 0.24 | −0.57 | 0.24 | 1.48 |
| Mammary ductal carcinoma_human_45537 | 1.02 | 0.16 | −0.67 | 0.16 | 1.59 |
| Mammary ductal carcinoma_human_45523 | 0.49 | 0.26 | −1.20 | 0.26 | 2.30 |
| Mammary ductal carcinoma_human_45535 | 1.03 | 0.18 | −0.66 | 0.18 | 1.58 |
| transformed primary embryonal kidney_human | 1.81 | 0.15 | 0.12 | 0.15 | 0.92 |

### Example 3

### Detection of Elevated Levels of cDNA Associated with Cancer Using Arrays.

[0321] cDNA sequences representing a variety of candidate CA genes to be screened for differential expression in cancer are assayed by hybridization on polynucleotide arrays. The cDNA sequences include cDNA clones isolated from cell lines or tissues of interest. The cDNA sequences analyzed also include polynucleotides comprising sequence overlap with sequences in the Unigene database, and which encode a variety of gene products of various origins, functionality, and levels of characterization. cDNAs are spotted onto reflective slides (Amersham) according to methods well known in the art at a density of 9,216 spots per slide representing 4,068 sequences (including controls) spotted in duplicate, with approximately 0.8 μl of an approximately 200 ng/μl solution of cDNA.

[0322] PCR products of selected cDNA clones corresponding to the gene products of interest are prepared in a 50% DMSO solution. These PCR products are spotted onto Amersham aluminum microarray slides at a density of 9216 clones per array using a Molecular Dynamics Generation III spotting robot. Clones are spotted in duplicate, for a total of 4608 different sequences per chip.

[0323] cDNA probes are prepared from total RNA obtained by laser capture microdissection (LCM, Arcturus Enginering Inc., Mountain View, Calif.) of tumor tissue samples and normal tissue samples isolated from patients.

[0324] Total RNA is first reverse transcribed into cDNA using a primer containing a T7 RNA polymerase promoter, followed by second strand DNA synthesis. cDNA is then transcribed in vitro to produce antisense RNA using the T7 promoter-mediated expression (see, e.g., Luo et al (1999) Nature Med 5:117-122), and the antisense RNA is then converted into cDNA. The second set of cDNAs are again transcribed in vitro, using the T7 promoter, to provide antisense RNA. This antisense RNA is then fluorescently labeled, or the RNA is again converted into cDNA, allowing for a third round of T7-mediated amplification to produce more antisense RNA. Thus the procedure provides for two or three rounds of in vitro transcription to produce the final RNA used for fluorescent labeling. Probes are labeled by making fluorescently labeled cDNA from the RNA starting material. Fluorescently labeled cDNAs prepared from the tumor RNA sample are compared to fluorescently labeled cDNAs prepared from normal cell RNA sample. For example, the cDNA probes from the normal cells are labeled with Cy3 fluorescent dye (green) and the cDNA probes prepared from suspected cancer cells are labeled with Cy5 fluorescent dye (red).

[0325] The differential expression assay is performed by mixing equal amounts of probes from tumor cells and normal cells of the same patient. The arrays are prehybridized by incubation for about 2 hrs at 60° C. in 5×SSC, 0.2% SDS, 1 mM EDTA, and then washing three times in water and twice in isopropanol. Following prehybridization of the array, the probe mixture is then hybridized to the array under conditions of high stringency (overnight at 42° C. in 50% formamide, 5×SSC, and 0.2% SDS. After hybridization, the array is washed at 55° C. three times as follows: 1) first wash in 1×SSC/0.2% SDS; 2) second wash in 0.1×SSC/0.2% SDS; and 3) third wash in 0.1×SSC.

[0326] The arrays are then scanned for green and red fluorescence using a Molecular Dynamics Generation III dual color laser-scanner/detector. The images are processed using BioDiscovery Autogene software, and the data from each scan set normalized. The experiment is repeated, this time labeling the two probes with the opposite color in order to perform the assay in both “color directions.” Each experiment is sometimes repeated with two more slides (one in each color direction). The data from each scan is normalized, and the level of fluorescence for each sequence on the array expressed as a ratio of the geometric mean of 8 replicate spots/genes from the four arrays or 4 replicate spots/gene from 2 arrays or some other permutation.

[0327] Normalization: The objective of normalization is to generate a cDNA library in which all transcripts expressed in a particular cell type or tissue are equally represented (S. M. Weissman, Mol. Biol. Med. 4(3):133-143 (1987); Patanjali, et al., Proc. Natl. Acad. Sci. USA 88(5):1943-1947 (1991)), and therefore isolation of as few as 30,000 recombinant clones in an optimally normalized library may represent the entire gene expression repertoire of a cell, estimated to number 10,000 per cell.

[0328] Total RNA is extracted from harvested cells using RNeasy™ Protect Kit (Qiagen, Valencia, Calif.), following manufacturer's recommended procedures. RNA is quantified using RiboGreen™ RNA quantification kit (Molecular Probes, Inc. Eugene, Oreg.). One μg of total RNA is reverse transcribed and PCR amplified using SMART™ PCR cDNA synthesis kit (ClonTech, Palo Alto, Calif.). The cDNA products are size-selected by agarose gel electrophoresis using standard procedures (Sambrook, J. T., et al. Molecular Cloning: A Laboratory Manual, 2d ed., Cold Spring Harbor Laboratory Press, NY). The cDNA is extracted using Bio 101 Geneclean® II kit (Qbiogene, Carlsbad, Calif.). Normalization of the cDNA is carried out using kinetics of hybridization principles: 1.0 μg of cDNA is denatured by heat at 100° C. for 10 minutes, then incubated at 42° C. for 42 hours in the presence of 120 mM NaCl, 10 mM Tris.HCl (pH=8.0), 5 mM EDTA.Na+ and 50% formamide. Single-stranded cDNA (“normalized”) is purified by hydroxyapatite chromatography (#130-0520, BioRad, Hercules, Calif.) following the manufacturer's recommended procedures, amplified and converted to double-stranded cDNA by three cycles of PCR amplification, and cloned into plasmid vectors using standard procedures (Sambrook, J. T., et al. Molecular Cloning: A Laboratory Manual, 2d ed., Cold Spring Harbor Laboratory Press, NY). All primers/adaptors used in the normalization and cloning process are provided by the manufacturer in the SMART™ PCR cDNA synthesis kit (ClonTech, Palo Alto, Calif.). Supercompetent cells (XL-2 Blue Ultracompetent Cells, Stratagene, California) are transfected with the normalized cDNA libraries, plated on solid media and grown overnight at 36° C.

[0329] The sequences of 10,000 recombinants per normalized library are analyzed by capillary sequencing using the ABI PRISM 3700 DNA Analyzer (Applied Biosystems, California). To determine the representation of transcripts in a library, BLAST analysis is performed on the clone sequences to assign transcript identity to each isolated clone, i.e., the sequences of the isolated polynucleotides are first masked to eliminate low complexity sequences using the XBLAST masking program (Claverie “Effective Large-Scale Sequence Similarity Searches,” Computer Methods for Macromolecular Sequence Analysis, Doolittle, ed., Meth. Enzymol. 266:212-227 Academic Press, NY, N.Y. (1996); see particularly Claverie, in “Automated DNA Sequencing and Analysis Techniques” Adams et al., eds., Chap. 36, p. 267 Academic Press, San Diego, 1994 and Claverie et al. Comput. Chem. (1993) 17:191). Generally, masking does not influence the final search results, except to eliminate sequences of relative little interest due to their low complexity, and to eliminate multiple “hits” based on similarity to repetitive regions common to multiple sequences, e.g., Alu repeats. The remaining sequences are then used in a BLASTN vs. GenBank search. The sequences are also used as query sequence in a BLASTX vs. NRP (non-redundant proteins) database search.

[0330] Automated sequencing reactions are performed using a Perkin-Elmer PRISM Dye Terminator Cycle Sequencing Ready Reaction Kit containing AmpliTaq DNA Polymerase, FS, according to the manufacturer's directions. The reactions are cycled on a GeneAmp PCR System 9600 as per manufacturer's instructions, except that they are annealed at 20° C. or 30° C. for one minute. Sequencing reactions are ethanol precipitated, pellets are resuspended in 8 microliters of loading buffer, 1.5 microliters is loaded on a sequencing gel, and the data is collected by an ABI PRISM 3700 DNA Sequencer. (Applied Biosystems, Foster City, Calif.).

[0331] The number of times a sequence is represented in a library is determined by performing sequence identity analysis on the cloned cDNA sequences and assigning transcript identity to each isolated clone. First, each sequence is checked to determine if it is a bacterial, ribosomal, or mitochondrial contaminant. Such sequences are excluded from the subsequent analysis. Second, sequence artifacts, such as vector and repetitive elements, are masked and/or removed from each sequence.

[0332] The remaining sequences are compared via BLAST (Altschul et. al, J. Mol. Biol., 215:40, 1990) to GenBank and EST databases for gene identification and are compared with each other via FastA (Pearson & Lipman, PNAS, 85:2444, 1988) to calculate the frequency of cDNA appearance in the normalized cDNA library. The sequences are also searched against the GenBank and GeneSeq nucleotide databases using the BLASTN program (BLASTN 1.3 MP: Altschul et al., J. Mol. Bio. 215:403, 1990). Fourth, the sequences are analyzed against a non-redundant protein (NRP) database with the BLASTX program (BLASTX 1.3 MP: Altschul et al., supra). This protein database is a combination of the Swiss-Prot, PIR, and NCBI GenPept protein databases. The BLASTX program is run using the default BLOSUM-62 substitution matrix with the filter parameter: “xnu+seg”. The score cutoff utilized is 75. Assembly of overlapping clones into contigs is done using the program Sequencher (Gene Codes Corp.; Ann Arbor, Mich.). The assembled contigs are analyzed using the programs in the GCG package (Genetic Computer Group, University Research Park, 575 Science Drive, Madison, Wis. 53711) Suite Version 10.1.

### Example 4

### Detection of CA—Sequences in Human Cancer Cells and Tissues

[0333] DNA from prostate and breast cancer tissues and other human cancer tissues, human colon, normal human tissues including non-cancerous prostate, and from other human cell lines are extracted following the procedure of Delli Bovi et al. (1986, Cancer Res. 46:6333-6338). The DNA is resuspended in a solution containing 0.05 M Tris HCl buffer, pH 7.8, and 0.1 mM EDTA, and the amount of DNA recovered is determined by microfluorometry using Hoechst. 33258 dye. Cesarone, C. et al., Anal Biochem 100:188-197 (1979).

[0334] Polymerase chain reaction (PCR) is performed using Taq polymerase following the conditions recommended by the manufacturer (Perkin Elmer Cetus) with regard to buffer, Mg²⁺, and nucleotide concentrations. Thermocycling is performed in a DNA cycler by denaturation at 94° C. for 3 min. followed by either 35 or 50 cycles of 94° C. for 1.5 min., 50° C. for 2 min. and 72° C. for 3 min. The ability of the PCR to amplify the selected regions of the CA gene is tested by using a cloned CA polynucleotide(s) as a positive template(s). Optimal Mg²⁺, primer concentrations and requirements for the different cycling temperatures are determined with these templates. The master mix recommended by the manufacturer is used. To detect possible contamination of the master mix components, reactions without template are routinely tested.

[0335] Southern blotting and hybridization are performed as described by Southern, E. M., (J. Mol. Biol. 98:503-517, 1975), using the cloned sequences labeled by the random primer procedure (Feinberg, A. P., et al., 1983, Anal. Biochem. 132:6-13). Prehybridization and hybridization are performed in a solution containing 6×SSPE, 5% Denhardt's, 0.5% SDS, 50% formamide, 100 μg/ml denaturated salmon testis DNA, incubated for 18 hrs at 42° C., followed by washings with 2×SSC and 0.5% SDS at room temperature and at 37° C. and finally in 0.1×SSC with 0.5% SDS at 68° C. for 30 min (Sambrook et al., 1989, in “Molecular Cloning: A Laboratory Manual”, Cold Spring Harbor Lab. Press). For paraffin-embedded tissue sections the conditions described by Wright and Manos (1990, in “PCR Protocols”, Innis et al., eds., Academic Press, pp. 153-158) are followed using primers designed to detect a 250 bp sequence.

### Example 5

### Detection of CA Sequences in Human Cancer Cells and Tissues.

[0336] DNA from human cancer tissues, normal human tissues and from other human cell lines is extracted following the procedure of Delli Bovi et al. (1986, Cancer Res. 46:6333-6338). The DNA is resuspended in a solution containing 0.05 M Tris HCl buffer, pH 7.8, and 0.1 mM EDTA, and the amount of DNA recovered is determined by microfluorometry using Hoechst 33258 dye. Cesarone, C. et al., Anal Biochem 100:188-197 (1979).

[0337] Polymerase chain reaction (PCR) is performed using Taq polymerase following the conditions recommended by the manufacturer (Perkin Elmer Cetus) with regard to buffer, Mg²⁺, and nucleotide concentrations. Thermocycling is performed in a DNA cycler by denaturation at 94° C. for 3 min. followed by either 35 or 50 cycles of 94° C. for 1.5 min., 50° C. for 2 min. and 72° C. for 3 min. The ability of the PCR to amplify the selected regions of CA genes is tested by using a cloned CA polynucleotide(s) as a positive template(s). Optimal Mg²⁺, primer concentrations and requirements for the different cycling temperatures are determined with these templates. The master mix recommended by the manufacturer is used. To detect possible contamination of the master mix components, reactions without template are routinely tested.

[0338] Southern blotting and hybridization are performed as described by Southern, E. M., (J. Mol. Biol. 98:503-517, 1975), using the cloned sequences labeled by the random primer procedure (Feinberg, A. P., et al., 1983, Anal. Biochem. 132:6-13). Prehybridization and hybridization are performed in a solution containing 6×SSPE, 5% Denhardt's, 0.5% SDS, 50% formamide, 100 μg/ml denaturated salmon testis DNA, incubated for 18 hrs at 42° C., followed by washings with 2×SSC and 0.5% SDS at room temperature and at 37° C. and finally in 0.1×SSC with 0.5% SDS at 68° C. for 30 min (Sambrook et al., 1989, in “Molecular Cloning: A Laboratory Manual”, Cold Spring Harbor Lab. Press). For paraffin-embedded tissue sections the conditions described by Wright and Manos (1990, in “PCR Protocols”, Innis et al., eds., Academic Press, pp. 153-158) are followed using primers designed to detect a 250 bp sequence.

### Example 6

### Expression of Cloned Polynucleotides in Host Cells.

[0339] To study the protein products of CA genes, restriction fragments from CA DNA are cloned into the expression vector pMT2 (Sambrook, et al., Molecular Cloning: A Laboratory Manual, Cold Spring Harbor Laboratory Press pp 16.17-16.22 (1989)) and transfected into COS cells grown in DMEM supplemented with 10% FCS. Transfections are performed employing calcium phosphate techniques (Sambrook, et al (1989) pp. 16.32-16.40, supra) and cell lysates are prepared forty-eight hours after transfection from both transfected and untransfected COS cells. Lysates are subjected to analysis by immunoblotting using anti-peptide antibody.

[0340] In immunoblotting experiments, preparation of cell lysates and electrophoresis are performed according to standard procedures. Protein concentration is determined using BioRad protein assay solutions. After semi-dry electrophoretic transfer to nitrocellulose, the membranes are blocked in 500 mM NaCl, 20 mM Tris, pH 7.5, 0.05% Tween-20 (TTBS) with 5% dry milk. After washing in TTBS and incubation with secondary antibodies (Amersham), enhanced chemiluminescence (ECL) protocols (Amersham) are performed as described by the manufacturer to facilitate detection.

### Example 7

### Generation of Antibodies Against Polypeptides.

[0341] Polypeptides, unique to CA genes are synthesized or isolated from bacterial or other (e.g., yeast, baculovirus) expression systems and conjugated to rabbit serum albumin (RSA) with m-maleimido benzoic acid N-hydroxysuccinimide ester (MBS) (Pierce, Rockford, Ill.). Immunization protocols with these peptides are performed according to standard methods. Initially, a pre-bleed of the rabbits is performed prior to immunization. The first immunization includes Freund's complete adjuvant and 500 μg conjugated peptide or 100 μg purified peptide. All subsequent immunizations, performed four weeks after the previous injection, include Freund's incomplete adjuvant with the same amount of protein. Bleeds are conducted seven to ten days after the immunizations.

[0342] For affinity purification of the antibodies, the corresponding CA polypeptide is conjugated to RSA with MBS, and coupled to CNBr-activated Sepharose (Pharmacia, Uppsala, Sweden). Antiserum is diluted 10-fold in 10 mM Tris-HCl, pH 7.5, and incubated overnight with the affinity matrix. After washing, bound antibodies are eluted from the resin with 100 mM glycine, pH 2.5.

### Example 8

### Generation of Monoclonal Antibodies Against a Ca Polypeptide

[0343] A non-denaturing adjuvant (Ribi, R730, Corixa, Hamilton Mont.) is rehydrated to 4 ml in phosphate buffered saline. 100 μl of this rehydrated adjuvant is then diluted with 400 μl of Hank's Balanced Salt Solution and this is then gently mixed with the cell pellet used for immunization. Approximately 500 μg conjugated peptide or 100 μg purified peptide and Freund's complete are injected into Balb/c mice via foot-pad, once a week. After 6 weeks of weekly injection, a drop of blood is drawn from the tail of each immunized animal to test the titer of antibodies against CA polypeptides using FACS analysis. When the titer reaches at least 1:2000, the mice are sacrificed in a CO₂ chamber followed by cervical dislocation. Lymph nodes are harvested for hybridoma preparation. Lymphocytes from mice with the highest titer are fused with the mouse myeloma line X63-Ag8.653 using 35% polyethylene glycol 4000. On day 10 following the fusion, the hybridoma supernatants are screened for the presence of CAP-specific monoclonal antibodies by fluorescence activated cell sorting (FACS). Conditioned medium from each hybridoma is incubated for 30 minutes with a combined aliquot of PC3, Colo-205, LnCap, or Panc-1 cells. After incubation, the cell samples are washed, resuspended in 0.1 ml diluent and incubated with 1 μg/ml of FITC conjugated F(ab′)₂ fragment of goat anti-mouse IgG for 30 min at 4° C. The cells are washed, resuspended in 0.5 ml FACS diluent and analyzed using a FACScan cell analyzer (Becton Dickinson; San Jose, Calif.). Hybridoma clones are selected for further expansion, cloning, and characterization based on their binding to the surface of one or more of cell lines which express the CA polypeptide as assessed by FACS. A hybridoma making a monoclonal antibody designated mAbCA which binds an antigen designated Ag-CA.x and an epitope on that antigen designated Ag-CA.x. 1 is selected.

### Example 9

### ELISA Assay for Detecting CA Related Antigens.

[0344] To test blood samples for antibodies that bind specifically to recombinantly produced CA antigens, the following procedure is employed. After a recombinant CA related protein is purified, the recombinant protein is diluted in PBS to a concentration of 5 μg/ml (500 ng/100 μl). 100 microliters of the diluted antigen solution is added to each well of a 96-well Immulon 1 plate (Dynatech Laboratories, Chantilly, Va.), and the plate is then incubated for 1 hour at room temperature, or overnight at 4° C., and washed 3 times with 0.05% Tween 20 in PBS. Blocking to reduce nonspecific binding of antibodies is accomplished by adding to each well 200 μl of a 1% solution of bovine serum albumin in PBS/Tween 20 and incubation for 1 hour. After aspiration of the blocking solution, 100 μl of the primary antibody solution (anticoagulated whole blood, plasma, or serum), diluted in the range of 1/16 to 1/2048 in blocking solution, is added and incubated for 1 hour at room temperature or overnight at 4° C. The wells are then washed 3 times, and 100 μl of goat anti-human IgG antibody conjugated to horseradish peroxidase (Organon Teknika, Durham, N.C.), diluted 1/500 or 1/1000 in PBS/Tween 20, 100 μl of o-phenylenediamine dihydrochloride (OPD, Sigma) solution is added to each well and incubated for 5-15 minutes. The OPD solution is prepared by dissolving a 5 mg OPD tablet in 50 ml 1% methanol in H₂O and adding 50 μl 30% H₂O₂ immediately before use. The reaction is stopped by adding 251 of 4M H₂SO₄. Absorbances are read at 490 nm in a microplate reader (Bio-Rad).

### Example 10

### Identification and Characterization of CA Antigen on Cancer Cell Surface

[0345] A cell pellet of proximately 25 μl packed cell volume of a cancer cell preparation is lysed by first diluting the cells to 0.5 ml in water followed by freezing and thawing three times. The solution is centrifuged at 14,000 rpm. The resulting pellet, containing the cell membrane fragments, is resuspended in 50 μl of SDS sample buffer (Invitrogen, Carlsbad, Calif.). The sample is heated at 80° C. for 5 minutes and then centrifuged for 2 minutes at 14,000 rpm to remove any insoluble materials.

[0346] The samples are analyzed by Western blot using a 4 to 20% polyacrylamide gradient gel in Tris-Glycine SDS (Invitrogen; Carlsbad Calif.) following the manufacturer's directions. Ten microliters of membrane sample are applied to one lane on the polyacrylamide gel. A separate 10 μL sample is reduced first by the addition of 2 PL of dithiothreitol (100 mM) with heating at 80° C. for 2 minutes and then loaded into another lane. Pre-stained molecular weight markers SeeBlue Plus2 (Invitrogen; Carlsbad, Calif.) are used to assess molecular weight on the gel. The gel proteins are transferred to a nitrocellulose membrane using a transfer buffer of 14.4 g/l glycine, 3 g/l of Tris Base, 10% methanol, and 0.05% SDS. The membranes are blocked, probed with a CAP-specific monoclonal antibody (at a concentration of 0.5 μg/ml), and developed using the Invitrogen WesternBreeze Chromogenic Kit-AntiMouse according to the manufacturer's directions. In the reduced sample of the tumor cell membrane samples, a prominent band is observed migrating at a molecular weight within about 10% of the predicted molecular weight of the corresponding CA protein.

### Example 11

### Preparation of Vaccines.

[0347] The present invention also relates to a method of stimulating an immune response against cells that express CA polypeptides in a patient using CA polypeptides of the invention that act as an antigen produced by or associated with a malignant cell. This aspect of the invention provides a method of stimulating an immune response in a human against cancer cells or cells that express CA polynucleotides and polypeptides. The method comprises the step of administering to a human an immunogenic amount of a polypeptide comprising: (a) the amino acid sequence of a huma CA protein or (b) a mutein or variant of a polypeptide comprising the amino acid sequence of a human endogenous retrovirus CA protein.

### Example 12

### Generation of Transgenic Animals Expressing Polypeptides as a Means for Testing Therapeutics.

[0348] CA nucleic acids are used to generate genetically modified non-human animals, or site specific gene modifications thereof, in cell lines, for the study of function or regulation of prostate tumor-related genes, or to create animal models of diseases, including prostate cancer. The term “transgenic” is intended to encompass genetically modified animals having an exogenous CA gene(s) that is stably transmitted in the host cells where the gene(s) may be altered in sequence to produce a modified protein, or having an exogenous CA LTR promoter operably linked to a reporter gene. Transgenic animals may be made through a nucleic acid construct randomly integrated into the genome. Vectors for stable integration include plasmids, retroviruses and other animal viruses, YACs, and the like. Of interest are transgenic mammals, e.g. cows, pigs, goats, horses, etc., and particularly rodents, e.g. rats, mice, etc.

[0349] The modified cells or animals are useful in the study of CA gene function and regulation. For example, a series of small deletions and/or substitutions may be made in the CA genes to determine the role of different genes in tumorigenesis. Specific constructs of interest include, but are not limited to, antisense constructs to block CA gene expression, expression of dominant negative CA gene mutations, and over-expression of a CA gene. Expression of a CA gene or variants thereof in cells or tissues where it is not normally expressed or at abnormal times of development is provided. In addition, by providing expression of proteins derived from CA in cells in which it is otherwise not normally produced, changes in cellular behavior can be induced.

[0350] DNA constructs for random integration need not include regions of homology to mediate recombination. Conveniently, markers for positive and negative selection are included. For various techniques for transfecting mammalian cells, see Keown et al., Methods in Enzymology 185:527-537 (1990).

[0351] For embryonic stem (ES) cells, an ES cell line is employed, or embryonic cells are obtained freshly from a host, e.g. mouse, rat, guinea pig, etc. Such cells are grown on an appropriate fibroblast-feeder layer or grown in the presence of appropriate growth factors, such as leukemia inhibiting factor (LIF). When ES cells are transformed, they may be used to produce transgenic animals. After transformation, the cells are plated onto a feeder layer in an appropriate medium. Cells containing the construct may be detected by employing a selective medium. After sufficient time for colonies to grow, they are picked and analyzed for the occurrence of integration of the construct. Those colonies that are positive may then be used for embryo manipulation and blastocyst injection. Blastocysts are obtained from 4 to 6 week old superovulated females. The ES cells are trypsinized, and the modified cells are injected into the blastocoel of the blastocyst. After injection, the blastocysts are returned to each uterine horn of pseudopregnant females. Females are then allowed to go to term and the resulting chimeric animals screened for cells bearing the construct. By providing for a different phenotype of the blastocyst and the ES cells, chimeric progeny can be readily detected.

[0352] The chimeric animals are screened for the presence of the modified gene and males and females having the modification are mated to produce homozygous progeny. If the gene alterations cause lethality at some point in development, tissues or organs are maintained as allogeneic or congenic grafts or transplants, or in in vitro culture. The transgenic animals may be any non-human mammal, such as laboratory animals, domestic animals, etc. The transgenic animals are used in functional studies, drug screening, etc., e.g. to determine the effect of a candidate drug on prostate cancer, to test potential therapeutics or treatment regimens, etc.

### Example 13

### Diagnostic Imaging Using CA Specific Antibodies

[0353] The present invention encompasses the use of antibodies to CA polypeptides to accurately stage cancer patients at initial presentation and for early detection of metastatic spread of cancer. Radioimmunoscintigraphy using monoclonal antibodies specific for CA polypeptides can provide an additional cancer-specific diagnostic test. The monoclonal antibodies of the instant invention are used for histopathological diagnosis of carcinomas.

[0354] Subcutaneous human xenografts of cancer cells in nude mice is used to test whether a technetium-99m (^{99m}Tc)-labeled monoclonal antibody of the invention can successfully image the xenografted cancer by external gamma scintography as described for seminoma cells by Marks, et al., Brit. J. Urol. 75:225 (1995). Each monoclonal antibody specific for a CA polypeptide is purified from ascitic fluid of BALB/c mice bearing hybridoma tumors by affinity chromatography on protein A-Sepharose. Purified antibodies, including control monoclonal antibodies such as an avidin-specific monoclonal antibody (Skea, et al., J. Immunol. 151:3557 (1993)) are labeled with ^{99m}Tc following reduction, using the methods of Mather, et al., J. Nucl. Med. 31:692 (1990) and Zhang et al., Nucl. Med. Biol. 19:607 (1992). Nude mice bearing human cancer cells are injected intraperitoneally with 200-500 μCi of ^{99m}Tc-labeled antibody. Twenty-four hours after injection, images of the mice are obtained using a Siemens ZLC3700 gamma camera equipped with a 6 mm pinhole collimator set approximately 8 cm from the animal. To determine monoclonal antibody biodistribution following imaging, the normal organs and tumors are removed, weighed, and the radioactivity of the tissues and a sample of the injectate are measured. Additionally, CA-specific antibodies conjugated to antitumor compounds are used for cancer-specific chemotherapy.

### Example 14

### Immunohistochemical Methods

[0355] Frozen tissue samples from cancer patients are embedded in an optimum cutting temperature (OCT) compound and quick-frozen in isopentane with dry ice. Cryosections are cut with a Leica 3050 CM mictrotome at thickness of 5 μm and thaw-mounted on vectabound-coated slides. The sections are fixed with ethanol at −20° C. and allowed to air dry overnight at room temperature. The fixed sections are stored at −80° C. until use. For immunohistochemistry, the tissue sections are retrieved and first incubated in blocking buffer (PBS, 5% normal goat serum, 0.1% Tween 20) for 30 minutes at room temperature, and then incubated with the CA protein-specific monoclonal antibody and control monoclonal antibodies diluted in blocking buffer (1 μg/ml) for 120 minutes. The sections are then washed three times with the blocking buffer. The bound monoclonal antibodies are detected with a goat anti-mouse IgG+IgM (H+L) F(ab′)²-peroxidase conjugates and the peroxidase substrate diaminobenzidine (1 mg/ml, Sigma Catalog No. D 5637) in 0.1 M sodium acetate buffer pH 5.05 and 0.003% hydrogen peroxide (Sigma cat. No. H1009). The stained slides are counter-stained with hematoxylin and examined under Nikon microscope.

[0356] Monoclonal antibody against a CA protein (antigen) is used to test reactivity with various cell lines from different types of tissues. Cells from different established cell lines are removed from the growth surface without using proteases, packed and embedded in OCT compound. The cells are frozen and sectioned, then stained using a standard IHC protocol. The CellArray™ technology is described in WO 01/43869. Normal tissue (human) obtained by surgical resection are frozen and mounted. Cryosections are cut with a Leica 3050 CM mictrotome at thickness of 5 μm and thaw-mounted on vectabound-coated slides. The sections are fixed with ethanol at −20° C. and allowed to air dry overnight at room temperature. PolyMICA™ Detection kit is used to determine binding of a CA-specific monoclonal antibody to normal tissue. Primary monoclonal antibody is used at a final concentration of 1 μg/ml. All publications and patent applications cited in this specification are herein incorporated by reference as if each individual publication or patent application were specifically and individually indicated to be incorporated by reference.

[0357] Although the foregoing invention has been described in some detail by way of illustration and example for purposes of clarity of understanding, it will be readily apparent to those of ordinary skill in the art in light of the teachings of this invention that certain changes and modifications may be made thereto without departing from the spirit or scope of the appended claims.

The application's sequence listing, which the Patent Office published only in electronic form, follows.

SEQUENCE LISTING (86 sequences)

SEQ ID NO: 1 - DNA, 192673 bp, Mus musculus
  misc_feature (1)...(192673): n = A,T,C or G
taatcctttaagggatttctgtgttacttatttaagtacttctaggtgtttacctgtgttctcctgtatttctttaagggagttatttatgtccatctgaaagtacactatcatcatcataagatgtgtttttttcccttgagatttctttttttttaaatatttttattaggtattttcctcatttacatttccaatgctatcccaaaagtcccccataccctccaccaccccccactcccctacccacccactctcactttttggccctggtgttcccctgtactggggcatataaagtttgcaagtgcaatgggcctctctttccagtgatggccgactaggccatcttttgatacatatgcagctagagtcaagagctccggggtactggttagttcataatgttgttccacctatagggttgcagatccctttagctccttgggtactttctctagctcctccatttggttttctcatggaatattttggattctccatttatggtaattgagaattttgatgggtatagtatactggcctggaatttctgttctcttagggtctgtatgacatctgcctagaatcttctagccttcataatctctggtgagaagtctagtgtaattctgagagggggccctgtgatccatccaatagctgactgtgagcatccatttctgtgtttgctaggccccggtatagtctcacaagagacagctatatctgggtcctttcagcaaaatcttgctagtgtatgcaatggtgtcagcgtttggaagctgattatgggatggatccccggatatggcagtttctagatggtccatgctttcgtcacagctccaaactttgtctctgtaactccttccatgggtgttttgttcccaattataagaaggggcaaaagtgtccacactttggtctttgttctttttgagaaacttaggaaacccaagatataagatacaatttgctaaacgaatgaaactcaagaagatgtgcttttaaatcagagtcttgcctttctggtatgttgacatttccagggctcactgtggtgggagaactgggttctgatgatcccaagtagccttgatttttgttgcttatgttcttgcccttgcctctcgccatctggtatctcaggtgtttgctgctcttgctgtctctgactgtggcttgtctttcctgcaagcctatgtgtcagtattcctgggagaccagtgctctctgtgaggaatttgtgtatggagagctgtggcacaaggtcagctccaggttgcagacagaaactggaaggatcctgttcctgctgttccttggttcctgtgtcctgatagctctgggaaggtccctcttgggccaggaatttgagtagaagtggtggtcttagctgtgctcacagatgtgtcagcactcttgagagaccagctttctctgggtggtatttgggtgtggagcactgtggtacagaatgagctccaggttcagaccatttctttaagtgcttcttgacttttagatatttctctgttaagaattcttgtttagctatgtaccccattttttaattgggaaattaatctgaaattctctttctttgttgagtctttgtgtggtttacatatcagggtgattgtggcatcatagaatgaggttgccaatgttctttctgtttctattttgtggaatagtttgaagagtattgctattcacttttctttgaaagtctggtagaactctgtgtggaacaatttggtcctgagctgcttcccaccgctcccacccccaccccacccccaggttgggagattttaatgactgcttctatttatagtactatttacattgttcacctgatcttgatttaactttggtaagtggtatctgtcaagaaaattatccattttgtttagattttccaattttgtggagtacaggcttttgaagtagggcctgatggttctttggttttcctcaggtctgtagttatgtctcccttttcatttctgattctgttgatttggatactgcctctctgcctctgagttagttttgataagcatttatctcttttttcaattttcccaaagaaccaggtcttggattcattgattctttgtgttctctttgtttctaatttatcgatttcagccctgaatttgattatttcctgcaatctacccctcatgggcatgtttgctcttttttgttctcgaattttcaggtgtgcttttaagttgctagtatgagaggtctccagtttccttatgaaggcagcaatgttgtgaaaagacagctaatgtaatactgagaagtggactcttctttttgtgatagaattttcttaagctctctggatctggagcatctctgtctctccagagtcactgtagagaggtccccatctaaacaggaagaacctaaggaggcaagctagagagatggctctgcaggtaattgcttgccgcctgcatctgaggccctaagatcagaactcacagctcccacataggaagattgtccagtaggatgcagctgtggtttcagaatgtggagaggataaggggaccagatggtcccaaagctttgctactcaacctgtcaggttataatagtgagatccagataataagagagagaagtgattaaggaagacatcctaatgtcaaccactggcttacacatgcattcactagagcgagtacacacacacagaactacacatgcactcacaagagcaagtaaacctgcacacacatgcacacacacacacacacacacacttacacatgcactcacaagaatgagtatacctgcatatacacactcttacacatgcactcacaagagcaaatatacctgcatgcacatacacacatatgcacatacacacatgtgtaaacttgagcaagataaagcaggctgaagaaagaggatgagaaagcttaagacccaagacccagaaagttcctgctggaccctcataggtcacagtgaaaagacttttaagagtcccctgcccagttggaattggagaggaaagagtgtttctctctcagagaacatgtgcaatgttgatttatcaagttggcctgaaatagttgtggggagacaatatctgaatagatttgtcttctctggaagtggaggtgtgcctcaggacagagctctgagggaaattctagttacatcccttcacttaatagttgagtccactgcacagttaacctttccaacctatgtttcctcatgtgtaaaacactgggtgctgattcgtggtattggaatgtctctgtgggaggaggttgagaagaggttagagcagctgtggtgctcgctaagcactctgcagatgtgttctatgacccaatactgagctaggttagggtgatgctggtgaagagaagggagcatgtgaaccacagctagaggtttccaaatcttaaaagccacaaaactcattaggagccaccagccacacaggttcacttgtagcagccattcataagacttttacattatgtttgatccctgagaagttaaatattcatggatagacagaaaaatgtaaaaataccatagaaccagtcagcaatctggaaaaaaatgttagtgaagggtccctgttggcctgtacaggtgagattgaaggaataatcagatgtttcagtatcctgaaatagaaattctgagaagtctcctctcttactgggacatgctactggaggtggagagggatggctggggaagctggtgttattcctagaactctgccagaatggcagctaactgggcttgtaggtggaatggggtgggtgacatggtcactgccagatttgctacacagagaaaggaggaagcaagccaaatctaccagtctatttccttagctttcaaggacgtagaaatgtattagtgtacaaaatgtggtgagcacagtaggtctctctctctcacacacacacagtaggtctggcccatctagctcgtactctccttccattttggagctgagccaacactgctgataataaattactgactctgaaacttaactacatattggaatcacctaggtagatttaggaacttctggtgactacatttttcccttagagaatcttaatttaattggtctggagacccccaagtagctttaagatatagcaaagcctgagaattagtgccctatattgaaatcagctgagaatcaccagcctcattaagtgagcacatgcatatcatacaggttttcataaagccaggaggagatagagctgagacaagctagaattgtgctatccatcattactatttaaatctaatgtaattacattcaggtaaaaattttaaattacttcttttgttccactggctgcgtttcaaattttaaaagatgcatatggctagtttctgccatttgaaccagacagaacatcatggaaagttctatgaatcaactctaagaaattggcaggaccttcaagctaagcaagcagatgcttaaggcaataaggcttgggatagaaatgaggaaggctgagcctcacacactggacattcagggggagagaagtgaactgtggagaacagaggctctgggcaccagaagacatatttgacagctcgtgcatgtgccagcccattggatgatttgctgctccaattgcgtagagcctgtagcctacaatgctggtagtgaagggagtggaaacccaaggcaactggcactaagccaggtggcactcatgtcattgacttcagaaccacacttcaaggcaaggtgctgcacttctactggctgctttgaacaacatcaaagccccagacggtgtccatcatgacagcagcatccatctctgtggtcaatgtcaggttgattccaggacctccaaccagaacatctctggcatcataggctcatatattgaaatgatcaagtgcacagcagaggactcgatgaactgctagttgggggagtggggaggggagtcccttgataccctgttcagtctgctccagagggctggaaggatttacatcatggtggctgaagaatgccagtctgggcaggaatctctctgcaaggcaccaggctgaatttttctagaaagaagggtgcattcattttccagggttgctttaagtaagtgacatgaggtgggtggcttaaaggacacatgaattcttgcaggtgctgggcaacagttgaggtcctgagacagagcactgttcattcagctagcccaaccatctgttttattatagaagctttatgtagcttaatatgccctcttggaagttaatatggtttgaaaaattgcctgcaataaaccctttctttcttgcacataagcttatcctttcttcattcagagaaaattagtttctctctatccaccctaaataaatgtggggagaaagtacttaaagaatatcagtctgagggagtatctagtttggagcctgccctgaggatatggtgaaatcctttggtcgatgatgtcattatttaccagggcctgttagaaacaagggtttctaaccccagtgcactctgactggcctcagtggttggttcctatggccaccaccttcacattctcaccaacagaaattttaaatttacacttacttattttttgttcatttatttaagagcacacttgtcacagtctgtgtgctgaggccaaaggataaccagcaagagtcggttctctccttttaccatgtcggatctagggttagaattcaagtcctgaggcttgagagcaggagcctttatgaagaaaaactttaagtttgtaagaccagaggttaacaaagaggttaaacacatgagctccagagctcaactgcctgggttcaaatccacccttgttacttgcaagctgtgtataaatgggaacgttatggatgacttctctcttcatgccaccgtagcctagctatgtttgcttttcaaaggatggacgtgaataaacatgaaataagggccaggtgatgcattccgtccacatgctgagttcaagagcctacgctgcatccgtcacctttcacatatgacgtgaaattgtctcagctggaaaagggtacaaagctttctggcgtgattgctgcaaaagccaaagttaacagatggctgcagatgtggctcaaggcaactgcagcctagcctagtgatcaaagttctagtccccagatccacgtaatgggaggcgaggactgactcctacaaggtgtcctctgacctctgcacatgtacacatacacacacacacacacacacacacaagcacacacacacacatatacgcgcacaccaccaccattacaacttatttaaacggataagaacatgtcctgaaatttctaaagcaatatgaatatgtcaatcatgatgaccagggaagataggggctgaattactattgttgtccttgcaaagtgggtgatagagagcaagcaagtttaaaccacactttaataagaagagcctcaacttacagagagcagtttatttcacaaggactggcgagcatgattgcctagggcacacagaagacgttggtgtgctcctgccatcccaacccttgggaagcacaggactgcctggattgctgggccctaccctctactcagaaaatcagtgtgagggattggattaaatggagtgggaacattcccctgctggagctggcatttgcagttagtaaggatctttatatttgcttaccttgaatgcaacaccccttattaagaatcatgagcaactcaaggctattgctctgggaaccctgtcttgagtctccagaagagatgatgcatctctcataatgactggggatgcataatgcttaaaaccaccttttcctactcatttaacattgtgagcactcacttgcctcaacaccttctctgtgtcgaaaacctgatgctcttgtggttccaagtggctgctgtttatccttggagatcaaatattttcataaagtaaatctgtactatttcatttcttcccatttctctcatttcctggggatggggtcacatgcttggatagcctatttgagatatgtagcttaatgccaacatgattcatagctctatgtgtgaattacacttgagaataaaagtgtgatccatttgtgtcaactgaagtgtctaatacaaaaacaaagaccaatttccattcactgtctcttttcacttgagcctgcccaagacactgaatgtattttctcttctctgaagatgtcaaatctacctataacccatttctctctcaaaagataccacagaagtatatgtaagcctctcatcttgtggttcattatttcacgcattcaaaccagatgttaaaatacaatgagtctctcagggacaaatggaaccattccatgagggagaagagcctggaaggacatgtcaggcctgtggtgtagatgccccatctcagtgtggaggtctctggccatcgaggaatgcaggaaagtcaccagctgttacagtatctttttccaaatgtaaaatagtagaaaccgccctttatacattggagatgaagcagaaagcacaccgacgaaaggcaaaggattgccttcatgtcaccttaactggtgatccacaaacttgtaaactctgatttccaccattacacaaaactagaaagactcaggaattatgccagtaaattctcgtactgccatagtcaatgaccaaagaatcagtcctgttcccaaaatggatgtgtgtgtgtgtgtgtgtgtgtgtatactgacatgtatgtatgtatatgtatatgtgtatgtgtatgtgtatgtgtatgtgtatgtgtatgtgtatgtgtatgtgtatgtgtatatgtatatgtatatgtattatgtgtatgagtgtaaaattctgctaaaataggaatggagtcttcataaggtgccagagtagtcaaagaatgaccaacttgtaaaatcctaagcatagtggactggagatggctttctgctgcgtatgatatgacaaaaacttatgttcctttctgctgcgtatgacatgacagaagcgatatgctccttttccttgaaacctggattgttcacccacttgtgcatgatgggtgatgcccctcacctataggttctctcacgcagtccagcatgggaaggcaagtggctaggaccagcatcaaggcaatgcagcttagtgttggagcgagcatgagactctctttgtggagcagtgtggtcatggatgacagcgtagaggacttcttccctctggaagattattatttcctcttacctatgtgagagtaaaggaagtggtattataatttgtgctaagacccaatacttttgagacagttggaaggccacatctctacttgaaagccaacatagtacaggaacaacaggctccagttgatttgtggagcgtgaaagaattggcttctcccatgggatggtgctacaggaactgggagagatttttttttcaggcttccaagaatataaatggctttgtgtggtttcacttgtgacaaacactaagggaaagaaccttacatggcccagatttagacaggaaacagacagcagaaccagagtgtccagtcatggagactgagcctttggagaactaaactctcccaggatgagggcacagagcaagcactggacagtagaacatcgggggagcttcagcagaatgcattacttcccttcatctgaagggacaagacatgggaccaaaagaccagatatgacagtgtgtgcctatgatcccagtgctcacggagaaactgaagcaggaagattgtgatagactctaggcctgcctggatacatagttaacttccagacagcctggactacatagaaagactttgtctggaaaaaaatgaaaaatgggacctgaagagatgattcagtggagggtctgagtttagttcccattgcctacatcagagaaatcataattactccagctccaggggacatcacactgccttctagactctgccagccgccactcccatgtaaacatacacatgtgcacaaagatatacttgtacacataattaaagtaataattttttaaaaaatctttaaaacaatccaaacagtaacaaagcatgcgatagggaggggacagagaaggatgagggttcatatcaccaaggcctagcacatgctctctgggtagaggggaagagtctttggcagcatctgtatgtgtagaggcagcttgactctgttctcagactccctcatctcatgtccagtccgccctctggtgctcccctcccagatgagagcccaggaaattcaatgtgtagattcagcctcctcgtggaacagcacagcatgtttcagccctggacctgggagaaggggacaaacagaggcagaaagaattacagctcatggcatgttggaacagtgtgtccattcttctaattgacattttgtagatgagaaaaccgagggccaccaattgtggtgaaccagtgaatgtctacctaatgaagaacatacttgagaacaaaggcagctgacctctgctctgatggccctcctctctgttgtcctgggaatcatgagttggaaacccccattagagtagacttggctaaaaggagacagctagcctaccatttcctatggctgtgcccagaagacatcactaattgatcacagatgtctttcctactgagcccagaaattccttcagactctcctgcactaaagatgatctcatcttgttctgttatctaattcatataacatgatttaataactccaaataaagaacctccgactgtttgtgatgtaaaattggtaaaattgtctgcaccaaagcttagctcattctctggagtggcctgtagagtttcagtttgctagccctagtgactattgggagggtatttatagattaatttgcttgaaggttagtactaaaagtcctaatccctgggggtttcctttttctcctttcaggtggacaggacggaggtgattcgtacctgcataaacccagtgtactcaaagctgtttacagtggacttttattttgaagaggtccaacgtctccggtttgaagttcatgacatcagcagcaaccacaatggactgaaggaggctgacttccttggtggcatggagtgcacacttggccaggtagacagaagatgtcttttgtctcctccacttcaggccttcctcccctcttctgatccttgctctcttttcctttagtggtcattttctttaaactacagcatcttccaacatttcctaggtactgttatatcagttatatgcacaagagatcatgcaagtatatgcagttgcttcttttgtagagttaataaactctcatcctgaatgtcctcattgtgtcggtcatgtatacaacaaatgcagatctagcacttactacatccgctatccctgtgtctgttagagccacaccaccctgtcccatgacaaatttgccatctcctaaatgatctggaagattcccacacatagactgttcctcattcaaatttatgcaaagtctccggagacaaaagttaaaatgacccaagattaaatagatactgtaatttaacccctaatgggaatgtgacatggattaagttctggataagggataaaaaagatccagagtgcttaagtgacctaccagtggttctcaacctgtggatcttgacccccacaagtattgaatatctgatatttacattataatacataacagtttcaaaactacagttatgaagtagaaataagaaaatgttatggttgggggtcatcacagcatgaggaactgtacgaaagggtcttagcattaggaagggtaagacccactggtgctaacagttcacccttgtaagtggcagagtcagtgctggccacaaagcccatcattttacttccactggcctttcctgtctatcccctctcaatctccttttgctgtacccagagtgcagtggagcatttgtaagaaataagtcaatggtttagactcagttcaatctcaaaatgctgagagctggctttttattggtctgagaggttagtgtcctcaaaccctgtggctagggacccgagaggacatgagaatgagccagttgtgcggagtctgagaatccggtctttatgttttgggttggtgagaagggaaagagaggtctggcatctccaagcccagaagctgtttttctggatcaagtgttccttctgaaactgcagagtgaaatataattcaggttttctgtttttgcaacatcagagcccagtgtatatgaatattcagttggtgaatgctttcaagaattctatggtagctggtttcttgaagccttgggcccgtttaatgtcgctggtttgggggtacaggtttcctttagaagagagggatcaaagtacaaaacctgttctgagcctccaaaataattgagctgtgtggaaaatgaaagtgcagtccacgtgctcaagcgcatcactgtgtgtcaggttctgggcccctaccctagtgtgtgggccttcaggaaatggaccaaactttgtgggaaaccaaaaataaaaaaatgtggttcagggaaagcagaggaaggaggggaactctccaggaagaaagttgtgtgaacaagtttgaaggtcaggtgagtgtgccaggggtgtggcttaggagagcctggtgtcagtgagccaggccagatgcctacttcctgtaaaccactaaagattgaacttcaaagctctttgcagcccaggcctcctactaaggctatggggtacattgttatttgtagatttgcagggttttgtcacaaagagggactccaaattatagaagcctaatgttccagcaaacctacattcccttcctgcctcaggaagggaaaactctgaggaaaagtcagcctagaaggcaagcctctgtgttcccatgtgggtgcttgccctcctgcaagccacttgctggaagacatttctcccagtggaaaagagaggtgactcagaatgcccctgttagccttttccaggaaatacagtgctcgccttcacaggaacacactatattcccttaaagaacgccaaaggccagatgcagaaattctcccaaggagaggcagagagagaaataaaggataattaatagaatcagcctgaagacttctcaaaagacttaatgatagagaattttagaattttgctgagacagccaccttttcggtacaaatgaaatgaatgacttatggattttgtgtgtaactttgtttaaggtttttaaaacaagcggtcagctgtaaaaattatatgtatgggaacctttagatgaactcagcgggttgaatttatgtgcagtaacacacacacacatgcatacatgcactggtatgtttatgtgtgtgtgtgtgtgtgtgtgtgtgtgtgtgtgtgttaatataataactgaagaagaattcatgaatttgagagtgagtaaggagatagcagaagagttagttgtaggaggggtagaaatgatacaaaacaaggttttaaaaatgatggttaaaaaaatgatatcattatatacttcagtgagcctttccaagattctgcctcagactctgggcttcttttatatagatataagttgtatttatcacaggaaataaatgtagatctatgtagaagtcacaggataaatgtctttttcattcaattttttaaaaataattttgcctgtgaaataaccctgaactttagttccttacaaggttcatatttccaaacaccagcaggtctgcaaccctggtttgcactagctattgcactagaggtcaacaatataaaagcaattgaagacagcatccctgtcttcaagctggtcaaatctagtttagttgtagttggggaagcaaagggctgagcaggaaaattacaactattacaaggaattgcagaatataagcctggtcactgggaggcattaggtgtgtgtgtggatggtggtagtctggagtaagggtttccaaggacagtggcatttacactgaaataaggagaagaaatcacatttccccactgatggcaggacaacatacaggcctctagatttaagaatgagctggccattatggtaaagagcttgtttgcttgattttgtcaagacacgagctccgaaatcaggggcgaaaagagtcgagacaccagaatggcatgaagaagcaactccatggaagaaaaacagtcctcaaggatgtatggtcaagccagccaccatagtgcatacttggagctgagttctattaggaacattctggaagccagtgcatagaaacgtcagagtttgcgccctagggatgaggaaattggctttttcacactctggctgaatctgttctgagcagtcattggtggagggctgctccaaggctggggacgtcaaactcccagcattcctagttggctgcctgggtagcaaaggaggctttaagactggtggaagcttaggcaaagaagtgttcagtggctgatggtcagaagttagtaacttggagtcacttcgtgggcctggcgatagaaacagaagctcatatgcgagttcttcagttcttattacggcttgccatgccttgatcatctggggatcattatttttgccatggggccctgtagagaatagctccgtctctaactcaggagggaatcctgactaagctcggctgcacttctcacccctccgcctgccagagttgtggcttagggctatgcctgtggccagacctaactagtaaagcatgagggtgttatctgaaagctcctagcctagagacacaaagactgtttttctctttgcctgggattcctgggagattgtggtagtcttgcagcatggcttggggtatgtgtagccctcagggcacctcaagctaaaaatcactatggaggcacagggttgacatgcagcccccacccccaccccccaccccaagccaactccaggtgacatgttggcctctgttgatgacaatcacctcattattggccatgagattagtagaatttgctttcctgacacatatgtattcagcatcacttggcttcaggcaatcaaagcatcctttgatgatgatggtggtggtggtggtgatgatgatgatggtgatctccttaccaccagccactgaactttgtctgattctagggtggttggtttaggggaggcaatgtaacattcatgcatttacttagtcattcagtaagcatttaccaggttccctggacatgtcaaatactatgcttggtgctagagatacaaacacaaagcagacagagactctgtccctgagaagctctgtaattacctaggtgacaccaacctgtagataaatgaccaaagtacccatggttaaatgctacaattaaaatgtgttccaggagttgtagaacaaagacttgtctgtccagaggaaatcaaagagaactcacaggaacgatgactctgaacctgaaacatgaactcaagagcagttcaccagcacaggaaataaagggactttccaaaccaaatgagcagaacacacaaagacacagtcacatgggacgttggggtgatggcagagagacctgaagagactgggtaagcagtcagatgaggatgggaagaagatacagaggcaacacctgtgaggaagagttgggccatgcagccttaagtgcttagacttgatgcactgagtccttggtaaccaggggaaagacgagattggatgcaagtgttagaaagagcacttcagtatgctcatgaaggctgcgtgggaacagagggatgtggaggcaaggatagcacttaggagacccatgtcatcaaaggcgtgagggggaaccacagtgaaggagacccagaggaggagacccaggggagagtctttggtcagcaagtttagaagagtagggaggggggtgactgcaaggtaactaagaggatcacttcacgctccctgaggagaatcatacaaggaaggggtggggcgccctgtgtgatactgacctaactacgctcaggactttgtgcagaaaacagggggtagggggggttgccagtggctgctgaccacttgagtgtggagtaaaacaataccgcgttagcagatactcctgacagtgacagtgagtagcaccgaagtggtcagcgagcccgggatgatgcaggttttcatttgtggaaggggatctgttgagcttaccatgtttgaatgaagcaaaggattgtttaaagctctctggagatgaaggccaccctacttcattgtctttcagagaagggaatgaacttgacgtcttaacattgtcaacaaaagcctttctttgttgagtgtcctccggtgcattttccctgagtgctgggnnnnnnnnnnnnnnnnnnnnnnnnnnnnnnnnnnnnnnnnnnnnnnnnnnnnnnnnnnnnnnnnnnnnnnnnnnnnnnnnnnnnnnnnnnnnnnnnnnnnnnnnnnnnnnnnnnnnnnnnnnnnnnnnnnnnnnnnnnnnnnnnnnnnnnnnnnnnccaaaagtcccccatacccacccacccccaatcccctacccacccactccccctttttggccctggcgttcccctgtactggggcatataaagtttgcaagtccaatgggcctctctttccagtgatggccgactaggccatcttttgatacatatgcagctagagtcaagagctccggggtactggttagttcataatgttgttccgcctatagggttgcagatccctttagctccggttgcagatccctttagctccttggctactttctctagctcctccattgggggccctgtgatccatccattagctgactgtgagcatccacttctgtgtttgctaggccccggcatagtctcacaagagacagctacatctgggtcctttctttttcttcccctcaaaatatctgctctctcaagtatgaacaagcaaaacaggaaaaccactaccacggtccctcttgacatctgtggtggtaaaaggaggtgttttttgtcatgtatagctaaggcaggcaaagaatggctagatgtcagctgggaggatgacacagccggtgtgtcccaggtggctccttaaggcttgagtataagcgctgtgggctgtactgtttaatggatcctcaatggcctcaagcattctctctcagtgctcccaggttctctgtccaaagacaaactcttcccactcttaaagccccatttcttcatctaccaatagagagagccgtattgctgagccttggcgatattgtgagggttggtctggagggatagctcagttcatgcaagcataacaggataacctgagtgagatcctctctgaaccattggaggagaggagcctgagtgcgggacatgaacttgtaattttagcactgggaaatggaggctcaggagccaaccagtctagcccagctggtgagcttcaggccagcgggagaccctttctcataaaacaaagtggacagctgcctgagaaaatggcattcaaggttgtcctctggcctccatatccatatgcatgtgcacatgtggaactctcaggtacacatgtctatatatatacctgcacacacaaatattcacctatgaacatacatgctcacatatgattacccacacaatcagtgagtcaatacataaaaaatgctgagctgagaccctgatataaagaaagcacttggagtgttgttgaagatgtctgagtgccgttattcatgtggtgaggatctagggaaagatgggaagggtcagcctcgtcaagggaaaggaagagttataaagaacgagttcccatgacctgggcagccaccaatactgaaagtataatttcagtttgttagtgatctcatttcatccagggattcaaggtacacattggctcatgtgaatgcttgccctagcatcagttcttttaggataatttgtgtgtggtggggagaggatggttttaaaacagaatgttgaagcctgaaaagttggcacactcctttaattccagcaataactagagacagacgactctctctgagttcgagaccagcctggtttaaaagagtgagttctgcaacagccaggaatacacagaaaaatcctgactggaaaaaaccaaaacctaaaccaaaccaaaccaaaccaaataaacaaacaaacaaacaaacaaaacaaacaaataaaaacagaatgttgcaataatctgggtagttattctaacccttaacccttatcttactagaactaaagcccacaggaaacaaatgaagtgaattcaccagaactacacaggaaatcacatgtgcagcctgttccctaccccattccccaaagccctaggcttccacaggtgcttggggggatttgagtttgagatgtgcctactctgccatgaacagccggacttttgctttacagaaagaaaagctgcagccctcagcaggctaggaactggcagactgtgcagttgggttcaagcacagcaagtgactgactgcacagagccaaaaaaaaaaaaaagtgcccaatgaggccatggaaggttcatgtcctcagagaggcagagctgtacattctcagcagatgggagaggggggtgagtcacaaggacacagagtgatcagaaagctgtgctttccttctgggttcctaggaactcggagagcatcctaccccaaactagatgcacagctaagccatcttgtgctacaccctaccaagggttcaccagaaaagacaggatacctcaccacctacaagagtgagctgccccttgccctggcaatttcatgtcccttcttcttctgttgtttattcactcattcacccatttctagatgtccacctctcttcacacaccaaggcaatgaatgatcctaaggaacaaagatgacttcctcaagctgcagggatagggagttactatcccttaccacctcaggacccagaattgagagacactggccgctactgttactgacattaagcagttgagagaaatgagagcaagaggacaggaacattgtcgagagccacaccgacctttatggttctttccatttattctagtagctagttcatcactaaatagtatacattagaaagcagtattagtgcaaagccaagttggagttgactttggtagtgtttggtggacccttttctctttcagttaaatttgttttatggtttatacagaaggaatatagatgacctgtaaacatttttttgtacaaacatgacattagttatcctccctcagaaaggacatttgctttaagaatatgatatagggactggagagttgactcagcaagtaggaacacttgctactctcagagagggcctgagttcatttcttagtacccacgttgggcagctcacaacctcttgtaactccattttcaggggatccaagatcctgttcagtatacacataattaaaaacaaaataaatcttaaaatcaaaagacctcagcatggctctctgaaaaatgttggagtgactgccaatgtcttaaaggcagaatcgtacaaagtcaccacccaggggcatccccacctggccaggattccttctgtgttcagtcatattgaacataaacattgcctaagttcttagaggcattttctcttttctatgggtcagcaacatttacattaagtcccccttctttattgccatgtggctgcccctcagtgtattttattctccagaatttatatctgtctgttaaaactgagaactccgtctgtgagccatctaggggtgctggtcttggtggcacagggttctttggctcctgtttgtaacagaaggatagcatactatgtgccacatgcatgcctggtgcctatggaggtctaaaaagggcatcagttcccctggaactggagttacaaatggttgtgaaacaccatgtgggtgctaggaatcaaacctcaggcctgtgctggaatgtccagggcttctgatcactggcccatctctccagaccctgatcccaaaacttataaaaatgtagattgattggcctatcctagagtgtctgatcccaaggatctcgtgggagacccatggtcagaatttccaggttccctactgacaccccttctgctgcaccagagactacctacactctgagaagcctgtacctgctagcgagtcagactctatcaatagatttagtgataaaataaaccaatgatgtaagaaattatctagagaagttaaggacccagaagcaagagcttatcatgaagttaacatttgtacaacagagtctgtacatggctcatgggttatatttttgatgtgcatgcatgtgtgtgtgtgtgtgtgtgtgtgtgtgtgtgtgtgtgtgtgcgtgtgtgtgcattcaggtgactgttgtaggggatcagtgcttgtgtatgtatgtgcttgtagagatcagagaacaatctcagatatcattcctagggcaccatataccttgctatttgagataacatttcttacttgtctggaactcatcaagtaggcccagctgactggccaatgagtgaaccccaaggatccacccttgtctccttttcctggtgatgggattacaaatacacactggctttttttctttcccacccctcctcttcttccatttgtcatgtgtgcatacatgcctttgcatgtgtgggggtgcatatgtgtgtgtggaggagcatgatcatccatctgcatgcagaggctcagagatttgtgttagaaggcatccttagttgctcttccatgctacacactgagtcagggtctatcattcaaatatgaaactcacccacatggctagttcccctagccagcttgctcatgaaatcccctgtctctgccttctgaaattgtaatttcagggtgtggtcccacattctgccttgccactggggtgtaggaatgccacttgggcaggtgaaatgggaggccttagactgcattttccctacaccgacatcgggttctgggtttatgggaagggccaatgcaccactcaggatgggatagcatagccttgggtgggggcctcagcctgagtgagaaatgacataggctgaggcagaatctggggttccctgactcccaggtgtccagtcactgctggaaacaacatggagttgggaatggaggggggccacaggcctgtgaggagcctaggaccaggagtttccaaactcccgaatatccagatgcagctggaagtcagggggagttgggaatggagtaggcccatgggctaagagcctggggctggaggaaggggaacaccagcttgctcagtggtagagagtccagaaatacagaaggaccttctgcagttcagtagacaaaggctttcaccattctccccatggctggtcttgatgagagagacagtccttggtttcaaactgtttattgactgttcatcatggaaaatgagtgcatgccacttcctcagggtggaccagaggttgaataccttttggaggaaggactgtctggaaagggaagcttattaactaagccctcagggccaatctagatacctcattagcatggagaacgttgttgtgatctacttgaccattgatcaggtccctatgtgaggagtgccaggtcaaggatctggtagggaacagagaaactcctactgtcctcagatgggtgccgtgccagggtttctgaacctactcaaccttaccaagtttcctggcatgatccactgccccacaacagtatcatgcccaccccgtgttcacttgggtttcatatggtctaaactctggtccacatacttgccttgcaagctctttaaccacaagacatctcagcttgatggagatcttggctgccactacgtatttctgctatccattaaatatagtcaaatggacctattatccagacaatgggttttcttcctgacggagatggatgtccagatgatatcagctcaatggcccttgaaaagaccgatagatctcaagttgtcacagtctatgggaatttgatctagggtcaaagtgtctccatttgtggacgccaaaagtggcatctgaactcactgtcatgcctagagcaagattctaagtcattttgttcaataatatctacttcttttgtgcattaaaaatgatgcctggggaagttaaatttacatattacagcaagcaactcatttcccctttgtttctcagagacaaagctttccctaattctgcagaaacactgcagtggcacctgcatgagtgagtgatgtcataggtaagcatcattccttcagttcccctgatgctgtggaagcctggcaaacagtactgctctctagtgttgatgctctgctcacataggatttggggtacttgtggggattcaagccccaacctctccaaggacaataaaatcctttctttcctttttttctttgttagctttttcaagctagtaaccttaaattcaaactctaggaaatccccgcttcctctggaagtcttcccttagagctttgcacctcctttagagggtctgcaattggagtcatgcactgtacatcaggtggctgccacccaggccctatatggcttttgccaagctgtttaacatctctgtgacatgtgggtcatggacttcatctatctgttttggaaggttggggtcaactcctttctgagttccttcccatccagtcagtggctgtcaatcatttcttgcctttcacctcggaaacaaagcattttttttctgtactcattcatttaaaaagtggtctcccaagtccccgccacacagcccacatgcacccctacagcacatctgtgactcagcggttccatgatgctaagtactagatgacattgagtaacagacagatggcattgctctaccctagcactctgcttccctagagaaagcaatcctgtgcccattccatttcaaagatactattaaaaagatacatgcagtggcaatttaaatgggattatgtttacgggccctatttcatatctattcagctatttaatacctgtcttagccttatttgatgcagaggaggaggctaagacagctgggactgaaagacagtttgcaagaacttccacctcagtgccgaaaaacagctccaggtatttgtcctggccttaaccctttaagccaggctggtacaaagcactcagcacccagactagcttacccaggcaaggaaccacttagtgcctacacctgagtccacctcagcttctgctttttcattcctaaccagctttccttagactctcgagtccatgtagctcagaactggctatccatgcagcctggccctgtctctgggatgtagcacacatgtcccaccacctgccactcatctttcctctgtatgtgctgtcttttttttttttttttttttttttgatggtcttcatctcagagctctctttttttttttttccattttttattaggtatttaactcatttacatttccaatggtataccaaaagtcccccatatccacccacccccactcccctgcccacccactccccctttttggccctggtattcccctgtactggggcatataaagtttgcannnnnnnnnnnnnnnnnnnnnnnnnnnnnnnnnnnnnnnnnnnnnnnnnnnnnnnnnnnnnnnnnnnnnnnnnnnnnnnnnnnnnnnnnnnnnnnnnntccgtctctgtaactccttccatgggtgttttgttcccaaatctaaggaggggcatagtgtccacacttcagtcttcattctccttgagtttcatgtgtttagcaaattatatcttatatcttgggtatcctaggtttggggctaatatccacttatcagtgagtacatattgtgtgagtttctttgtgaatgtgttacctcactcaggatgatgccctccaggtccatccatttggctaggaatttcataaattcattctttttaatagctgagtagtactccattgtgtagatgtaccacattttctgtatccattcctctgttgaggggcatctaggttctttccagcttctggctattataaataaggctgctatgaacatagtggagcatgtgtctttcttacctgttggggcatcttctggataaatgcccaggagaggtattgctggatcctccggtagtactatgtccagttttctgaggaaccgccagactgatttccagagtggttgtaccaggatcaagttgaccatctaaacagtcccatatcacctaaagaaatagaagcagttattaatagtctcccaaccaaaaaaagcccaggaccagatgggttaagtgcagagttctatcagaccttcaaagaagatctaattccaattctgcacaaactatttcacaaaatagaagtagaaggtactctacccaactcattttatgaagccactattactctgatacctaaaccacagaaagatccaacaaagatagagaacttcagaccaatttctcttatgaatatcgatgcaaaaatcctcaataaaattctcgctaaccgaatccaagaacacattaaagcaatcatccatcctgaccaagtaggttttattccagggatgcagggatggtttaatatacgaaaatccatcaatgtaatccattatataaacaaactcaaagacaaaaaccacatgatcatctcgttagatgcagaaaaagcatttgacaagatccaacacccattcatgataaaagttttggaaagatcaggaattcaaggcccatacctaaacatgataaaagcaatctacagcaaaccagtagccaacatcaaagtaaatggagagaagctggaagcaatcccactaaaatcagggactagacaaggctgtatgtgctgtcttgatgcccttctcagatgtcagcatcccgagtcccagataagaatacactgcccttgtcccagtgtggagccggaagccactgtatcaccatgaacagccttgtcaataggccagatcactggtttgctaaacctcagtaaacaaagctctttaataaataatgtttcctctcaaaccattctcataaaaaaaaaaaaaccagttttctgaactacaaattttaaccttataaagtttgcttcaattatgttaaaacgtgaatatttctgacttcttcaaattatgaatgaaatttaggtagtgttgatgatgcgcctttcagaatacctaacaagtcataagaatattaaacagtgtctcatattttctttcaaaaagggagaaaaatatggtggtggtcagtaagcttccagtttgctcaaaggacaaaggctagggaggatatgtatctaggtgctaatgatggtggcttcagggttgtgagactatagctagtgtgtaatgtctcagctgtgtttctctatactttttacaatgaatatatagtgcaattatgatttaaaaaaagtacaacaaaggatctcaggagttcatgagttgtgtgtgccacacaacataagggctggagtttgggtcccaggcatatacataaaatccaggttaattggtgtctctctataatctcagcactagggacaaaactctgaagcttggtggccaggcagaccagactaacagtgagctccaggttcagtgaggccctgtctcagaacaacaacagtggagagcaaaccaggattgtaaaataccacagtggtcaagtaggactatcatcccttttatttatttaacagaagaacttgtagtctctggttggctcgagggtacagttcatgtcttacttattgttttattgccctgagagacaccatgatgaaggtaacttagaaaaggaagcatttaattgaagacttgattatggtttaagaaggtcagtctgtaattatcttggtgataagcagacaggcatggtactgaaacagtacatgagagctttacatcgtgatacactggtttcaggaagagagagaaacagaaacagagacagagagaggcagagacacacaagacacacacacagagacagagagacagaggcagagacagggagagagacaggcaggcagacagatgatagacaaacacagacatgtacctgtatacacagagagagagagagacaaagagacagagagaggcagaaacagagagagacagagactgagagacagagagacagagagagacagagatacaccaagacatacagagagagacagatggagagatggggaggggggggcaagcagacagatgatagacagacacagacatacacctctacacacacacacacacaaccatataccacacatattcacgcaaaaaaaccaaacagtgagtattagtaaaaacatcctgaacatccataaataagcaaaagaggatgggacatacattataaagattcttaacctccccacctcccacatatataaatgtccatgtaaatgcaaatacacatgcaagaactacagagaagagagagagagagagagagagagagagagagagagagagagagagaaagagagactcttaaaccattgataaatgtttacaatatatgcagattttcagcccaggatgtcagtagaaaagtctctggagtgcattatttgtaagatttttgagaagtcgtcctaagatgcttttgagaaaaccttggtccccaacactctgcccatgggaagcagaaatgacccagctaatctgattctgagcttttgtaatattacttttggttaccgaagagacctaggaaggcccaggacactaataacaaatagcttaagaaaccagcattgcctctgcaaaggggttgtgagattctcccagagctgatacaagctgaatttgagaaacataatatttgtattttgaattaatctaataaagtttagaggaagaaaagttacctgcttggtttacaaagtcactcccaagagtcttagatttagatcccaggacaaaatgaggccaggtatgaattaattagccttgcttcacatgaaacgtgggcctctggggcttctctgtgcaccagtacaggtcgtccaaggtgcacactcctgagtcccagctcccaaaggcccagagtaagctgactccagccctgtctcctacttccttagcatctgcccacacggaggctcagggcaagactcttgacctcactagtcagagaaatgaaggagcagaaatcctgccaacccctctcccctctgttgaaattcaaagcaagaattctgctgttacaattaatttgctgacagggccctagtggaatcagacatctgagaactgaggagacaaagctctcttcccgctgaggagtgtgccctcttctgaacacttctgtggaaggggactgtacactctcatgagagagacatataatgagactgtaccctgtggttccatttgcctaggccatattaacttaaacacatcatgttgttttaattaaacacatttttctttcatttttaaaatgccccactttgaacaacataattttgtggctacttcatagtaataaatcgcttttgtagctgaccagttcagagagctgatcttaggtctggctggcacttatgaccctggtgctcttgatggtatcatagttatcattgctaccatcacagttgccatcatcatcatcgtcgtcatcattgtcatcactagtaccatcatcaccgtcaacactatcaccaccattagtcatcataaccatcacatcatccccactaccacagccattaccatcaccatcagtgctgtcaccaacatcaataattaccactatcatcaccatcactatcatcccccaccataactataatgttatcttaatcattattatcaccatcactaccagcagcagcagcagcataatgatcactaccatcattgctacctgtccaaccatcatcatcatcatcatcatcatcaacaacaacaacaacaacagcaacagcaacaactacaacaacacccaggcaagaacagaagcctgcaaactggcacagcaaaacttacatgagacatctggattcatggaattccaagatgctcttctcatattcctaatctatattacatctgccctgtttcatatccttaataagaaaactattaaaacagttttaaaatcctcactgggtttctctaagtgttagataaaaagaagagaaggaggaggatgaggaagaggaggaggaggaggaggaaaaggaggaggaggaagaggaggaggaggaggaggannnnnnnnnnnnnnnnnnnnnnnnnnnnnnnnnnnnnnnnnnnnnnnnnnnnnnnnnnnnnnnnnnnnnnnnnnngaggaggaggaggaggaggagaagggagaaaataaagaccgatttccattaaaccttattctatcatgaagtattgtgtcaaatgagagcaccattatctctaattgatagattagagacaagagtcagcaaccttggaagctcaactccttcacccaagatcacactggagtgtagctccaattcaaaattaagatgagttgatttcaacatggactctgtattccatcacatccctcaaatcaaatggaatgcgattttatttttaacgttatttactgtaatttatgtgtatggcatgtgttctgtctgtaggcatatgtgtgcactctgtgcatgcctattaaattccctggaactggagttacaggcagttatgagtctccatgtgggtgctgggaatcgaaccccagtccactgaggagcaacaagtgtttttagctgctgagccattctctccagccccaccctttgtaaacttaacccaaaatgtgctgttcttcctgaatgctgccactgtgaaagtagtcaggaatgcctagcatgggacactttattccacaaggtggtagattaatcgaggagtatttctgataaatattcacagatggagtgccagagagctctttatgctaagaaaaggcttttttttttcagacacaggagtcagaggatttaagcaacttggagtatgtttgccatgttcagtcgtggatatgttttgtccatatatttattcatctcttattgaataataagtttactaaatgctaacagtaaacacagctagtgatccacccagaaactttgcaccaacttacacacatccctctactacatcttaagtaatagctccaacatctcctttctgaatgagtctctctttgaagcttttatcatcacatgaatgagaagacagaccttgtcatgaattaaatgccaactcccccacatagacccttccccagccatagatgatcatggagaagacagaaggctgaatgtcatccccccactccaccatggacctggaggttaattccacactagtgggtttgtccaagggttgggggtaaagtacattatgatgatattgctaagggctcagcctagatggctggctcactcttagccctgccttctttccctttcttataatccatgtctgttctttcttttccattcattatttatgctttggagatttccaggccaggacacttcctcaaatatccaacaatataggtaacaactccaaggataactcacagacatctcagagccaatatccccaatccaagctcactgtcttctatcacccatccttcctctagtggggtccatgcagtgaatggtacctctatcttcccagatgccggagaaaggaaacctggaagccctccatcacctcccactccccagcccacctataatctgatcatgagaccctaatcaatcttcaattgattgaggtgtcttcaatgcctcacacacatcctttctacctctggaccccagtctaagtcaataaatagaggactgtaattatctctaagtagggactgactggatgggatagaaggcaagaaatcattttcaaagcacctgttgtctggttgtggaatcttgtaaatgctcattatgcatttgagaaatatgtgtgatagataatattatcatgagttcacagattaggaaactggggtacagctgatgaagctccttaaggccccacacctgggcttgcatctacagcttccttgcagttcttggcgtagaaggtatagtggaaggcccaacagtctaatgaacatggatgctataactcgattgtctagattcagatcccagattcccttactggctgtgaaagtctcagtaagtcagctttctgtcatgggctaaatgatagccttcacaacttttgcccatgtcctgtgagcatgactccaactagcaaaagcctttatcgtttgaagtgaatgatctcaagatgaagagaccctgagtgagccagacgagtcccatatccattaacacgggtctttgtgagagaagaggagagggccatctaaagaaaaagaagagtaaatcagttctcagggaaaaaagcagaggaacagagatgccaccagaagctggagggacaagattcagagtggcccaagatcctctgagaaaacatggccctgccaaccctttggtttcaaacttctgccctctagagctccataagagtaattgctcttgctttaagcttcaggtctgtagttctttgctagatggtcagccttagcaaactacaggctctccacgcatcagttctcacctgtgtgtgagcatatagcagtgctttaatggccatcatgagaactaagcccattagtacccacaggccctttatagcagcagctgccaaatggttgtatttagtttgactcttaaatagttagtatgtgacttttaactggtaacaataaggacactctgtctacctcaaagttgggttaacatctttcattttaaaactgcaaagtctatagagtccagctctacagactgccaatgcttgattgctagccttgccgtaaacaagctacaacctgccaaaggcagtggttgaaaagctgttgcctgcccttcccttttagaatgttatggactggacactgagctacgtgaacaaccctttcttctttccctgcttgcccatagtgtggcaggcagggtgggatgagggaccaagtggcttttgactagtctctatactgagtcatttgggatggtaatggagccatacttagtaacaaagcaaaggtgagtaattagtgctcagaaggattgaaaccttaaatccctctccttcactctaactcttgctaatgaagtcagagaaagggtaaaagcctgtaattacaccgaagtaattagaaccctacttaatagaatgcttaaggcaggaagcccaaaccaatagatcacccattgctaccattacctgctctgtccttctgaatcatcctccctaggatggtccatttaaagcattggttcttagcctccctgacgctgcaactctttaatacagttcctcatgttgtgacccctgaccgtaaaattatttttgtggcttcataatttcagttttgctactgttgtgaatcgtaatgtaaagacctgatatgcagatggtcttattgctatccctgtgaaagggtccttcaacccctaaagaggtcatcatggcccatatgttgagagccactgacctaaaggctgaagactatatttagtttgtctaagtggcacaggcatactgccaccatctctcctgcatgctcaagacagcttcagaattgtgtttttctagcgtgacttcatgatacccgcctctaattccagctactcaagagactgaggcaagagactctcaaatccaaaggctgcctgagctacagaatgagttcaaggataacctgggccacttactgagagcctctctcacaataaaaagtaaaattgaagtagaaggacgtaactcagggataaaaaagccttagctttatccccaaaaccaaagatgggggaggcaggttgtgcctctcttaagtgctacaagttttcctccttggtgaagtcccaccaggacaacttagtttaaaaggccctttaagtacacctttaaaatcggatcacattatgcactgtagtaagaatttggagatttgggtgggttttgttgttgttgttgttgtgttttgttgtgttttgttttgttgttgttttaaaacacagaaatattgtaagaatgtattttgttttaatcctaggtgtgggatgcgtggctgcttcaaattgtctacagcagctgactatgatttgcctcgtgctctaacaggggtgtgatttttgtcagctgcagatagttcctgtaattgtgtgacatttggaattttggggactcttcagaagatatatacatgctaggaacccccagaagtggggtaggttgttgtttggtcgttgttggtccttgttggtcttggttcatgagtagtagtgcacaaagaagaaataaagagaaaaagaaaatatatatcctgatggcaaaaatcaaacttgtcccaaggacctcaatgccctagtcaacaggaagtattctaataacaatattgcccccttcctgatccccaactttatttaggaattctctctcctccactaccttctctctatccttctttctttcctatctagtgttaaagggttgaatggttggaagaagggtggggaacggtggaagaaagaagaacccacaaagtagcaaagccagctacagtgcactgaagttatttgtctgactgtattcttactttctagttcaaagaaaaggagatggggtgtttatataccaagttcacccatccttgtttgaaagctgttcccaaaagtgtagttcttcccacttcctgttttgtgtatctgtgggcaggaagtacgagtgacaggcattttctcttcctaggtgactcagctatagtccagattagaccaggttaaaagtagataaaagcaggtttattaggagtcacctctagggtgggttcactgatctcaggggtgggtgtcagtgaagtcacacatccaggctaaagcaagggggttttacagagtgatgaagtgccagccaggagctgggattgtgtctatacatagttaaaaactgagctgctgggcggacactcctgggtgggttgacagaagcacagagatgaggagtgatggcaggttaacccaaagttttctccaaatggatggggagattttttttctgtggggttgcaggaaggagttcgttcaggtggtgcttaccatcttgtgcaggaggtgagcagggttccagcttaacattctgacctctttgggtatagggatgccaattcagatctggctacttcctgctgaagaggggcagagtggtgtgggagagtcgggagtctatggggtcctgctcagccgccaggtgtagaaggcttggttgacctttacttgggagaccatgaatctgtttctgaaggaagaggagcaggcaaggtgctaggagaaaaataaaagacagattagtatcatcagccctacaaactgggctggacatgtgaaaagtgaaaattgtcagaaagaatggaatggagatgtgtcctgagagagcagtctctctgtctctgtctctgtctctttctctctctgtctctctgtctctctgtctctgtctctttctctctctgtctctctgtctctctgtctctctgtctctctgtctctctgtctctctgtctctgtctctctctgtctctctgtctctctgtctctgtctctttctctctctgtctctctgtctctctgtctctgtctctgtctctttctctctctgtctctctgtccctctccctctcctcctctctctctctctctctctctctctctctctctctctctctctctctgtgtgtgtgtgtgtgtgtgtgtgtgtgtgtgtgcgcgcgcgctcgcgcacacatgccagagatccaagttgagtgccttctttcattattttctaccttatttgagggaacaaacccagaactcactggttgctctaggctagctggctggtctgctccagaatccaccttcctctgcctccccatcactgagatttctggcccgtgctgctgggcacagcttttagtacatgggtactatcgactggcctcgggtcctcctgtttgtgcaggaagcaccttaccaactgggctctctccagccctgggcactgtccttcctttttgcagcttcccatcttctcgtgtgtttgctactacaatttctcggactacacctaacaaacaaaaacaaaacaaagcatcctggcagaggacagggaagctgccggaacctcttgggctttcctcttgtagagctggtcaatcttcctacagccacacttgatatctctgtgctcgaaggctttgggtggtactgactgtagaccaggactttgttctccggagcctttagatttggagacgtcctttctacggtttctccacccaccactgtttgaccccagggacactgtttgacacaagtcataggcctaggggtctccacttagactgagagatgggcaaagctgaattccaaccctatcctcagtccccctggggtgcctgttacgaaatttatccaaattgggactgtctcaggttttgagccccaaaacaccattgttctgtggcctggcttcagtaaatggctaccagagagcatttatttttattattattattattattattattattactactattattattaattactattacatattttctttatttacatttcatatgctatcctgaaagttccttgtaccctccccccactctgctcctctacctacctactcccacttctcggccctggcgttcccctgtactggggcatataaagtttgctagaccaagggacctctctttccagtgattgctgactaggtcatcttccactacgtatgcagctagagacacgagctctggaggtactggttagtcagagagcattcttgatgttagcatcctccatgatcttagatttctccttacatatgggcaacggtctgaactcccctctatccaggtttgttgggaaccacactctcatccctctctctatagccaatattttatggcaaggctctactagtaagtatggtcctgccagcggaccccattgcctccaaggactccaatcctgaatccaagtcccctgttttggccaagccccgcctccaactccctcgtcttcgcagcaacatacttatttcggctgcaatggcttctccgaaccaggttgttaatctaaccctccacagttatgtacaaatcatttgtctgcgaatttgattccaaattccagagtccgattcttcagcccactctgtcccccacatggctgtggcacgcaggcttcctttcagtttgccctagcaaatctttagaagcaccccctcctcctctctccttgctcattggacaacggcatactcactcccatatcagccccgcccactctgcacagtccagcctatcccagggtgaggcctcaatgctgctgtattgaacaccacagcttctccaacacaccttaacagcctgtccctccaggagctatggctttcttaagcctatgcctggttcacagaactgattttttcccttaggcctgtgtaggaatcttcacccacctccttccaacctccccagtcttcagcaccatgggtctccaaacttgatccagctcctccaccactccaacagtcccacccccttctcacagacaaggctctaacaaataaaacaaaacaaaaacaaaaacaaaacaaaaaacaaacaacaaccaaaaaaacttccctcctttcagcccagtgcgcagctacccctcccttcctaaagctaaattctacaccattggctgttgggagaagcagaatccgtctctcccagggatgagtcaccctcatttgttgtccaatgtagagtggtcagccttgattgcatgtacacaaagacagcaaaaactgactcagattgtatctatacatagtcgtgcatacacatacatttataactatatacatatacacataaatatcaataatataacaataatcaaagaaaatggctatcaacttgagtgtaagacatatgaggggttcaaggggcggttgctgggaggagctagaggagagaaaatgactagggaaagagatttaattttacttaaattaaaaatattaaaaatgtaaccaggtaatggcagcacacaccttcaatcccagcactcaggaggaagaggcaagtggatctctgagtttgaggccaccctggtctacagaatgagtttgaaggcagccagggctattcagagaaaccctgtctcaaaaatacaaaacaaaacaaaataaaataaatgctataaatacattttaacagatttctctccacccttgtagcgtatgagccaatgtttgacacatataagatattcaataaatatttgcaactgcaccgatttcaaagctgattataaaaagaatcctgagaatgttttcactacaagcagcctcatgacaaatgcatgtctggtatccaaatgactatttttgaaatacagctgattatacacttgctacaacactggcttgagtgtttattttcctggctttggtcctatttgcttaaataaaactccaggctttcctaaaaaaaatgaggtctgtttgtttaacattgggctttacggaacatggagacctgtgctgttggacactgctgttttccacactagaggagtctgccctccattgacccagggctggctgcagagcagattcttggtggtgcaaatgtccctgtgctccaaccttgctcacccaggggcttcagcttccatttgctctttctgggcatcaccctcctgcagcatgcaaaggtctgcagctctgaccctgccacggggtaaacggaatcaaattcaagaacttgtgacaggtgcacccccctttagccttgatgccaagcaaaccttattatttgctggcctcaaatgtcagctgcagccagggtgggtccttgtcactatgactttctcattctaaggcatgacctgaggtctcctccagcctggtgcaaagcaacagaatatgtgtgatattggtttgggggggggggtttgcagtgaacagacttctccataccccagcttggcacccatgctggttttgcctgagagctccaagaatggcatcaacaatgacaggccattgcatgtctatcatggtcaccatggaagctttgaaaccttaatgattattcgtccttggaagctgagttggaggcctagagagtataaagtgggttgttatttggtttggttagtcacttggacgccaaaggcccactttctagccctcagaaggcaggagatagtgcacagtaactggttcttcacatcctggactgcaatgttggttgtgtctgcataagactgggcaaagggagctggggaaatggagtgtcaccaagggtgaggatctgagttttacttccagtgcccaagtgaagaaaataaataaaagccaggagtggaagtatacatttataatcttgagaaggttgaggtagacagatctccaggtatcactggccagccagcctagcttgactggtatgtaccagacccgtgcgagaccttgtctcaaaaactctcagacaggattgccctctgacctccatatgtgcatgcagccaggtacatgtgcaacttcacacgtaagaatatgcacacccacactcccaagactgaagacaatataccacggtccaacttggctcccatgtgttgacttctcttacatttgcttgaagcatggaaatatggatcttgtaagacgcagcctgtggggacaatccatctgcacctgtgagtgactagtagagtccctgaaggtttgttggaatcaactggaacctgggtaagaaaccaatgtaggcaaaacacaaggaggataggaagaaatgcctctgatagcagattaacctggaaaatgggaaacgtctcccgtcagatgttagcccacttgctgctcatagataatcagtgtttggtcattttttattatttattagacattttctttatttacatttcaaatgctattcgaaaagttccctataccctccccacacccttctcccctacccacccactcccacttcttggccccgacattcccctgtactgaggcatataaagtttgcaagaccaagggacctcttttcccaatgatggctgaccaggccatcttctgctacatatgcagctagagacacgagctttgggggtactggttagttcatattgttgtcttctgtgaggctatgccagtacctggcaaatacagaagtagatgctcacagtcatctataggctagagcacaggtcccccaatggaggagctagagaaagtacccaaggagctgaaggggtctgcaaccctacaggtatttggccatttattcatcttgtgttccccaccctcctgctgcaagactcattggaagaaactctgtgttccgtgaggtcaagtctcgttttgcttgtgcctattcttgatgtctggcccaaagtctctcatgcagtggtgagaagatgcctacagagttaagacatctgacgtagtggtgctctctgtaagtgggaggcttccttggagctgtcattgcagctaccattggtgtgaccagcaacactggtgtgaccaccaggtagtttcatgttggaagtgctctctactcttcagaccacagcccagtgatcaccacaagcacaggatcctgatggaagcattgctctgctcagcccgggaatgtcatttctaggcttcttcactctgactagaatactgatttttcagtactctagcagggagacaggaaacacaccatatgagaatgggttgtctcccaacctcacacagtgcctttctgtgattaacaaaaagaaaacaattacctgaaaatgctataactttacaaaagccagtctttatcatctcaatactccttgtttctagaaccagggtgtggcttttctaggtcttctagataaggacctatcaaagatgaagttagggtgctactgtccctgggatcagcttaggggtagatttcttcccatacccctgagctcaactgaaagtaaccatcagcccctttctgcatgaggctttatacaattcagttatttgtgtcccccaaaatagcacgagaaatgggagttcccaaccacatattctctctccactctccaggtgtgctgatgattagaagctgccactcaagggaggggctcacacaatagcaccacaccaggaagctagcatcactggggaccgggttagacagaggccgcccatcaaagatggtgatgttgcttcccttaagcacaggcacagcaccatctggactctcttaactttttcctttgggcatggcttatgtacacacacacacacacacacacacacaattgccactgtgtcttaccacgcttgcctttcacagtagaaaaaaaggtgggggcaatcagagggacaagcaagttcttctaagaataacttcagtgtgatgatgtagctgtccctgcatgcatgcagacaccgggtcatgaagagcacccaagttgcttgtctgagcattggtttcctgatgagacagatagctccctgatgtatatattgaaaatagaatccagaggttacagacccagaagttacgcattttcacctcctcctcccggcacctactttgcaaagatttgatgctaatttcagacgattccaaaactttgttcctgttaacttgatgttcacgttccacactgccctcctcgttctgatatgaacgtctcagcaacaattacaccacctcccaaatgagttatctaaatcccctttcttccagcacacacagaaggagaaagcaggggctaatttgtattcagagaggcccaggaacaaggccggactcataagtggacatagatggtttcaggtggagctgttgtcggtgaagcatcttgcagaggagaatggttaaagatagacctgaagtcacatacatagcatctcttctttctgtttccttttgcagattgtctcacagagaaagctctccaagtccttgctgaagcatgggaacacagcagggaaatcctccatcacggtaagctggccctgtagtggcaacaggtgtcagacactgtgcactcaccaatccaaaagggacactagggtaatgtctcctctgcctgctgggaactaactgactacccctggctcctctgtatgtctttttttttttctgccttccacctttttctttcttggtaaactattttgatcgttttacccttagagaaaatgggaaggaaagtagatttgaatgggagatcactcacttcttactgagagtttctgcaatcacaagatagagtaggaaagagaaaaaagaaaaaagttaactttgttgaacacagtgagaatatggaattgactaggcttttcagatagaatctctctctctctctctctctctctctctctctctctctctctctctctctctctcttattctcctattataatatttttgttttaaaaggatttagttcatggtttagtttgctgcccaagaagaggctagcctgagcagtctttattaagcaacagattggagctctgttgcttggttctatagacagtagctatttcagcaaatttagtcccggtttaaaataaaataaaataaatgcagctcctttgtgacactgttaataaataaattgaccaaaaatgaatgagtctagtgacttgttaaagaaaaggcaagtgccttttaatggttttgcttgtttgtttggttttggggggattgtttgttgtttgtttgttgttttgagacagggtctcactatattgccctggctgacctggaacttgctatgtagatcaagctagcctggaactcagagatatctgtctgcttctgccttttaaaggctaggattaaaagcatgcatcaccaagccaagcaaggaagcttttcttagtcactcctcttgatagctttacccacagcctgggccccatctcatatttcatgcccagggtttgaaagtttgtcaccctgctgctgtgtattctagtgagctcctgtccagagctggaaatggtgtatgcatgcataaggaatgtggagaaacgtcttactcaatgtctgtgtttgctcatttagagatcaaagcgacccgaatgtgctgctaggctcctgggctgaacaactcctgtgtgcttttctcctaggtgattgctgaagaattatcgggcaatgacgactatgttgagcttgcattcaatgcacggaaattggatgataaggtaaaatggtctgcattgacctcactggaggaagtaataaagccaagacacacagtttaatcagattcttcctcgaagctatttttccctttcaacccacattattaaacatatcaaagacttcagagaggtctggaaggtgaggctttccccaaaatggagaggcagttaagaaagaggggaagggcctgtaattagtacatgaccatttggtaacactaagtcttcatttgtttccaaacatcataggtcagctgtgcccaagaaaatatgacttgttcccaatcatcagggccattctaaatggaaaaaggctgtgagggggtagaaggatcacacataaattagcatcggtgtttgcccagttcagagttacgagctttgcacacactgtctcattagtcatttgtacaattcccaggtgaggggtagtatgactgaaggtgaagaaagattaaaagatgagtaactaaactaagctttctccatgtcacagtccagagcctctgaataacagacaccaaggctggataaacacaaggattgttatctgcagaaattccagtgggttgcagaaaggaaaagctgggggaactgacaggtcatgagggaattccaacccttgaggaaagagaaatgagcaagcatggatggaaagtctcctagaatgccacctacaccaaaagaggagcagcaaagccattgggaagttccagggctgtgtctcccagccaaggacctgccttagtgtcccctatgcacttccttactggacagagcagccctaggtagcctggccacagtgtgaatgcaaagatggacattagagttcagaagcctataaccctcagccagctccatgccctacagaaagagtttacaaggtatttccatggccactgcatcctgatagtggtaaagctgaagatccagtcccatgtcagtctatgcccaactagttagtcttgtgtgtgtgtgtgtgtgtgtgtgtgtgtgtgtgtgtgtgtgggagagagagagagagagagagagagagagagtgcatgtgtacgttgtgtatgtgtgtgtacatatgtatgactgtgtgtatatgagtgtatgtataaatgtgtatgcatgtgtgtttgtgtgtgtgagtatgtatgtgtgtatacatgtatatgagtgtgtttatgtgtgtatatgtgtgtgtacatgtatatgagtgtgtgtctatgtgtgtgtacatcggtgtgtgtatgagcgtatgtgtgtatatgtctgtgtgcatatgtgtgtgagtatgtgtatgtacacatgtgtatgagtgtgagtttatgtgtgagtatgtgtgtaagtgtgtgagtatatatgtgtacatgtgtgtgaaatacaaaggttagacgcccagcttcacctgatcatttctatgatttcccttcaaacgtatccttatgccaaaggccacaccacatcaggaattattgacccacttgctctcttatttatgagtttattcctttattcatcattcatttgccaaaccacactgggtgtctgttagataaaggtgctagggaggggatatgcttcccttgctgcaacctggacagcatcttctaagttaaatacaaattaaaaactacatgagatataatgttatggtgatgtacatgatattttaattagtgtgtgaataagaatgtctgggatatcagactttaatccttataagccgtgtgtgtgtgtgtgtgtgtgcgtgtgtgtgtgtgacaatatttaaatattatccctcaggagccatgggtcttctttttcatgacaggctgtcccactggctcttagagcatgctgattatgctggattggctggccagcaaaccccagggatccacctgtctctgcatccgccgtgtggaaattgcaaacctgtcctaccaaatctagattttttttcccctcctatttatttttaaaaatttttgcacacgtgtatcttgattatatccacctgactctctctcttccaggcccctacccaacaaacattttcctcccaagttcatttcatctctttaaatttaaaaaaattatagcacagtgagtccaattactgctgcctatatgcacacagatgtcgagttaccactgggacatgggtgcttactagtagccaaccctccatacccacagcaatgctacttgatccccaagaagctatcaactgtcaatacaccagctaacagtgaggtctagggagcccctccctcttcaacattgaaatttgtttgttttgttttgtgttttcagacagtgtttctctatgcagtgctggctgtcctggaactcactatgtagaccaggctagccccaaactcacagatgtccacctgactttgcctgctgaaatgctgagattaaaggcagtgccatcatgcctggctcaacattgaatatttttttattcttctctcatatagtacatcctgaccacagttttcccttcctcttctcctctcagtacacacccacaccccaacccattcttcctccttttctattcagaaaaaatcatccctcccttgtatatcaacaagcatagcatatcaatttgcagtaggaccaggtgcttaccttcctattaaggctagacagagcagcccagtaggagaaaaaggatcccaaaagtaggtcaaagagtcagagatagcccctgctcccactgctagtagtaactggcttggttatgtgcagctcttaggatgacaaccacagccactctgaattcatgtgtggaagagccatgtcctgtctagaggagcacacttcccagtgttcctccccataccccagctcttacaagctttctgtctcctcttccatgaattcccaaacactgggggaacagttccccatgatagagatgtcttgtctatggccaggcactcttaatcactaactctcaacacttggactagttttgaggtcctacattaaccaccaccctctgcagcaagaagcttctctacccaaggttgagagcagctttagtctatgatgtaagcatgagtgcttgagtctatgatgtaagcataagtgctatggtctatgatgtaaatatgagtgctcgagtctatgatgtaagcatgagtgcatctcgagtctatgatgcaagcatgagagagcatctcaagcctatgatgtaagcatgggtgattgagtctatgacataagcatgagtactctagtctatgatgtaagcaggagagcagctcaagtctatggatgaggacttagagtgcagtttgacacccatttagcagaacaacatcgtttctcccctagggctatgacttcagtggccatgggttttaaccacgcttataggaccagacgtgaatttccttttgtagagcagcccccatatccaatcaagagagtcattggttaccccataaataatttgaccattattataaaaggagtacatcatgtctagtagtttggtattgcagcatggagggctcagtgctggataagatcatcaacgtccattcttccctccagcagtctgcatagcacatttcagctctatgaaagctagctgttgggtagagaattccctgatcggttcacaactaaacactctgtgctctgcagtcaaagtgggtggtgtcttcagcaatagtcttgccatgtagttatcacatccaggtttttacacaggttctccagattaaacacagtcctcatacatactaagatacacaaacacacacacacacacacacacgcacgcgcgcgcacacacattgctagaacagaataacacagtacaatccttttcttgcacaagtagaaataaaattagcttctggaaattctcaagtaagattcctttctagatttttgctttaaacagttttgcgaccacttatgtagtcatcagatatattcactggctagaaatcaatgactaaaagcatctgtcatacaaataagttcttaggctttagtacattagtaacattaaagtaactgatttctgcatatacttaaaaactgcagcttgactatgtggtggaaatgggctgtatgcagttcatacaagtcgcaggaaatctgaatctctgagccgcgagtaaccctggtagcctttcagcatttaaacaccacaggtaaaaaccacactgctctacccacctgccttctctgaaagatggtgagactctgagatgtgaaatgatttacctaaagcaacaaatacacactcaaaaaacaagcaaatgaacaaacatcagggacagagggtgacccagtgaagttcctggttcacatataaattagattgctttcaggaggtgggacccttggctcagagaatcaggaagccaggcaaaggaggctgggtatatatgctggaggtcagcagttgtcaaagggaggtagtatgtccctgcctgcttccataggagtccctaaacctgtttccatagtaaccctaagacagcttttctcctattctcactctctcactcctgaacaatgagatgctctggagggtgactgagcctccctgagcacaggagcacatgtgagaacccgagctcctctccctctccttgggttgctgtgtacaaaccttagtaatactcacctcactggcttcttgaatttggaaagtacatttctttttcttttttttttccattttttattaggtatttagctcatttacatttccaatgctataccaaaaagtcccccatacccacccacccccactcccctacccacccactccccctttttggccctggcgttcccctgtactggggcatataaagttttcgtgtccaatgggcctctctttccagtgatggccgactaggccatcttttgatacatatgcagctagagtcaagagctccggggtactggttagttcataatgttgttccacctatagggttgcagatccctttagctccttgggttctttctctagctcctccattgggagccctgtgatccatccattagctgactgtgaggatccacttctgtgtttgctaggcccctgcatagtctcacaagagacagctacatctgggtcctttcgataaaatcttgctagtgtatgcaatggtgtcagtgtttggatgctgattatggggtggatccctggatatggcagtctctacatggtccatcctttcatctcagctccaaactttgtctctgtaactccttccatgggtgttttgttcccaattctaaggaggggcatagtgtccaacttcagtcttcattcttcttgagtttcatgtgtttagcaaattgtatcttatatcttgggaatcctaggtttggggctaatatccacttatcagtgagtacatattgtgtgagttcctttgtgaatgtgttacctcactcaggatgatgccctccaggtccatccatttggctagaaatttcataaattcattctttttaatagctgagtagtactccattgtgtagatgtaccacattttctgtatccattcctctcttgaggggcatctgggttttttccagcttctggctattataaataacgctgctatgaacatagtggagcatgtgtccttcttaccagttggggcatcttctggatatatgcccaggagaggtattgctggatcctccggtagtactatgtccaactttctgaggaaccgccagactgatttccagagtggttgtacaagcctgcaatcccaccaacaatggaggagtgttcctctttctccacatccacgccagcatctgctgtcacctgaatttttgatcttagccattctgactggtgtgaggtggaatctcagggatgttttgatttgcatttccctgatgattaaggatgttgaacattttttcaggtgcttctctgccattcggtattcctcaggtgagaattctttgttcagttctgagccccatttttaatggggttattcgattttctgaagtccaccttcttgagttctttatatatgttggatattagtcccctatctgatttaggataggtaaagatcctttcccaatctgttcgtggtctttttgtcttattgacaaaattgacaaaaaaaaaaaattgtcttattttgtcttttgccttgcagaaactttggagtttcattaggtcccatttgtcaattctcgatcttacagcacaagccattgctgttctgttcaggaatttttcccctgtgcccatatcttcaaggcttttccccactttctcctctataagtttcagtgtctctggttttatgtgaagttccttgatccacttagatttgaccttagtacaaggagataagtatggatcgattcgcattcttctacatgataacaaccagttgtgccagcaccaattgttgaaaatgctgtctttcttccactggatggttttagctcccttgtcgaagatcaagtgaccataggtgtgtgggttcatttctgggtcttcaattctattccattggtctacttgtctgtctctataccagtaccatgcagtttttatcacaattgctctgtagtaaagctttaggtcaggaatggtgattccaccagaggttcttttatccttgagaagactttttgctatcctaggttttttgttattccagatgaatttgcaaattgttccttctaattcgttgaagaattgagttggaattttgatggggattgcattgaatctatagattgcttttggcaagatagccatttttacaatgtttatcctgccaatccatgagcatgggagatctttccatcttctgagatcttctttaatttctttcttcagagatttgaagtttttattatacagatctttcacctccttagttagagtcatgccaagatattttatattatttgtgactattgagaagggtgttgtttccctaatttctttctcagcctgtttattctttgtatagagaaaggccattgacttgtttgagtttattttatatccagctacttcaccgaagctgtttatcaggtttaggagttctctggtagaatttatagggtcacttatatatactatcatatcatctgcaaaaagtgatatttttccttcctcttttccaatttgtatctccttgatctccttttgttgtcgaattgctctggctaatacttcaagtactatgttgaaaaggtagggagaaagtgggaagccttgtctagtccctgattttagtgggattgcttccagcttctctctatttactttgatgttggctactggtttgctgtagattgcttttatcatgtttaggtatgggccttgaattcctgatctttccaaaacttttatcatgaatgggtgttgaatcttgtcaaatgctttttctgcatctaacgagatgatcatgtggtttttgtctttgagtttgtttatataatggattacattgatggattttcgtatattaaaccatccctgcattcctggaataaaacctacttggtcaggatggatgattgctttaatgtgttcttggatttggttagcaagaattttattgaggatttttgcatcgatattcataagagaaattggtctgaagttctctatctttgttgggtctctctgtggtttaggtatcagagtaatagtggcttcataaaatgagttgggtagagtaccttctacttctattttgtgaaatagtttgtgcagaactggaattagatcttctttgaaggtctgatagaactctgcactaaacctgtctggtcctgggcttttttggctgggagactattaataactgcttctatttctttaggtgatatgggactgtttagatggtcaacttgatcctgactcaactttggtacctggtatctgtccagaaatttttccatttcgtccaggttttccagttttgttgagtataaccttttgtagaaggatctgatggtgttttggatttcttcaggatctgttgttatgtctcccttttcatttctgattttgttaattaggattttgtccctgtgccctttagtgagtctagctaagggtttatctatcttgttgattttctcaaagaaccaactcctcgtttggttaattctttgaatagttcttcttgtttccacttggttgatttcacccctgagtttgattatttcctgccgtctactcctcttggatgaatttgcttcctttttttctagagcttttagatgtgttgtcaacctgctagtatgtgctctctcccgtttcttcttggaggcactcagagctatgagtttccctcttagaaatgctttcattgtgtcccaaaggtttgggtacgttgtggcttcattttcattaaactctaaaaagcctttaatttctttctttattccttccttgaccaaggtatcattgagaagagtgttgttcagtttccacgtgaatgttggctttctattatttatgttgttattgaagatcagtcttaggccatggtggtctgataggatacatgggacaatttcaatatttttgtatctgttgaggcctgttttgcgacgaattatatggtcaattttggagaaggtcccgtgaggtgctgagaagaaggtatatccttttgttttaggataaaatgttctgtagatatctgtcaggtccatttgtttcataacttctgttagtttcactgtgtccctgtttagtttctgtttccacgatctgtccattggtgaaagtggtgtgttgaagtctcccactattattgtgtgaggtgcaatgtgtgctttgagctttactaaagtgtctttaatgaatgtggctgcccttgcatttggagcgtagatattcagaattgagagttcctcttggaggattttacctttgatgagtatgaagtgtccctccttgtcttttttgataactttgggttggaagtcgattttatccaatattagaatggctactccagcttgtttcttcagaccatttgcttggaaaattgttttccagcctttcactctgaggtagtgtctgtctttttctctgagatgggtttcctgtaagcagcagaatgttgggtcctgtttgtgtagccagtctgttagtctatgtctttttattggggaattgagtccattgatattaagagatattaaggaaaagtaatcgttgcttccttctatttttgttgttagagttgggattctgttcttgtggctgtcttctttttggtttgttgaaggattactttcttgcttgttctagggcgtgatttccgtccttgtattgcttcttttctgttattatcctttgaagggctggattcgtggaaagatattgtgtgaatttggatttgtcctggaatactttggtttctccatctatggtaattgagagtttggctgggtatattagcctgggctggcatttgtgttctcttagtgtctgtataacatctgtccaggctcctctggctttcatagtctctggtgaaaagtctggtgtaattctgataggccttcctttatatgttacttgacctttctcccttactgcttttaatattctatctttatttagtgcatttgttgttctgattattatgtgtcgggaggaatttcttttctggtccagtctatttggagttctgtaggcttcttgtatgatcatgggcatctctttctctatgtttgggaagctttcttctattattttgttgaagatattagctgaccctttaagttgaaaatcttcattctcgtcaattcctattatccgtaggtttggtcttctcattgtgtcctggatttcctggatgttttgagttaggatccttttgcattttgtattttctttgactgttgtgtcgatgttctctatggaatcttctgcacctgagattctctcttccatttcttgtattctgttgctgatgctcgcatctatggttccagatctctttcctagggtttctatctccagcgttgcctcgctttgggttttctttactgtgtctacttccctttttagttctagtatggttttgttcatttccattacctgtttggatgtgttttcctgtttttctttaaggacttctacctgtttggctgtgtttttctgcttttctttaaggacctgtaactctttagcagtgctctcctgtaattctttaagtgacttatgaaagtccttcttgatgtcctctatcatcatcatgagaaatgtttttaaatctgggtctagattttcggttgtgttggggtgcccaggactaggtggggtgggagtgctgcgttctgatgatggtgagtggtcttgatttctgttagtaggattcttacgtttgccttttgccatctggtaatctctgaagctagctgttgtagctgtctctgttaagagcttgttcttcaggtgactctgttagcctctataagcagacctgggagggtagcactctccttagtttcagtgggtagagtattctctgcaggaaagctctcttcttgcagggaaggtacccagatatctggtgtttgaactggactcctggcagaagttgtgttccactcactagaggtcttaggatcccttgtggaatcctgtgtgggcccttgcgggtgtcaggcgactctgctggcaaggtagcccggggctcgagtggagcggaaggggcttgtgccccaggtcaggcccgggtagtctgcttccctatgtaccgcagtctcaggttccgcgcgattggattggggccggcgctgtgttccactcaccagaggtcttagaatcccatggggaatcctgtgtgggcccttgcgggtgtcaggcgactccgctcacatttatttttctgattaaatgttactttgttcctctttgtgggccttgtcattaaaaaaaaaaaaaaaaccaagtgaatattcttcaaggtgtaagttttataacatggtgtttattaactagtacaatccacactaaaagtctggcaagtctccaataatttttaagagcataaagaaatatcaaaaccagatgtttgggagccattgtgggattcaccagcgagtgctaaatacttttgcaagccacagtgataaagcagtctgtccattcttcttggcagaaagttacttttcagtttcctttctgcagctcagcagagcagcagctatccaccaaaggctgaaatctttgaagtctgacaggcatttgtcattaagagcgagcaagtaaaataaattgcatttgtgacgggtatcttatttctttaatgtcgacacaactcacttagtggagagataggcttacacaactcacttagcaaagagataggctttatagcttcttttgttatattagcacacgtccatcatattagcaggctgttggcaattagcctaccatggaggcatacatatacatgctttggaacataaaagctaataggatcttccttctcctcccttccctgaggaagtatccatgctgctggagagaaactgctttttccactggtctccacatctgcaaaggttgtcatgacagactctattttaatggttccaggaacctagcttgacagagaggtagatgacgaagcaaatgtgtctctaaaatagaggttgtcaaacttttcctgtgcagggccagatggtaagtactgtaggctttgcaagccatatgctctctgtccctatcactgagctgtgtcttgaggcatgaagacagacataagtgaaacataaatgaagggatgtggcagtggttcagtaaaactttattcataaaaacaatggctatatttgtctctcatagcgtagttggctaactcctcctttactgtgatatgaaaactctgcttgctgtcctgtagggtcatggttcttgagtatggctgcctggaattgggggccaggtaagcataaatgatgggaaaattatagttattaagccactccaatgtaccagtactcaagtacctgacccatacgatccctaagatgctgactgtatttccaaaggtaggcatttatatttctaatttacacacagagcacagggagctttgcccacagacccaaagctgactaaccatggtatctagatatggcaacctccttccagttcttctctaaatcagtgttctggttcaaacaccactgctgtagatatgcactgttcattttgcttcttgtttctttaaaacatatattcttttataaaacacgcctgctaagtaacagcttccacatgattttttttttcatgcatctttggttttagctgactcccctctcctatgcatccacatctccctgcttccccttgcccccgctctgtacctttttcatccccatatcccccattccactttgttctgttatcttgtccacacctcccatttttccatggacctgttctagtttcctagcttttgtccacatgtctacacacaatgaactgtcagaagctgggggtcacaaagaaaagagagtgggttgtatgatggtatctgtctatctgatcctggattgttttggttgatatgctggcttctagtttcacccagttccctgcaaatctcccagcttcatgtttgttcacgactggacagaactccgttgtatatctctgcctccctttcatcatccattcgtcaactggtagacttgtaggctagtttgatttccttgttattgtgaaaagatcagatagaaatatgggtgtgttccaaattatttctgttataggatggggagtatcttctttttttattttttttaaatagacaattatttgtatgctaatctgatatacatactcaatgtgtaatgagcatattatggagattagtgttttcaactcttcaaacatttgtcattgctctttgttgggaacttttcattcttcctctatagttcttgaaactaccacaaatttcatagtcacccccacccagcagatttctttcacattggaccaaagtagtgttacctatagaatattaaatgattcactatagcaaaacttgtctaattggcctgattcattcaccttcatcatggtgaactgtctccaagatcactttaatataaagaaaactaaagagtccagattatggtgacctaacaattgtgcccagggttgtgatttacaatccatgaggatctgcatgagtaacttttttgaactgcttttgaggggtattgtttcgagcaatcaaatatactcctaaccatcactatcctcatatttgactagctcttcacagtattagtgtgacttctgtttttcctacattactcctagaaggcagcatttataagtttaccatgtgacagattcgtgcagacagctcttctacttttcccacactgctatagagaccagtgatcttctcacactgtgtgtgggaaattgaggctatgaccctgtgctcaggattatccagagcagatgtgatggagtttggatttaagagtaacgctaaagccacctagagtgtattagattttcagatgaatgaagccagagactgcatctgactctaccttttacgctctggtacactcacagtatcctgatgctaataacccttgtcagttaaagaaacagatcctgtaatacaggaatgatggagatggtttattctggagctaaatatgagggaccagggcctggtacacagggttaggtcttttcccaaatactatgtttcaatgagggatccatttcataaactctttatagcagccaagtttaaatatgtatgaaataaaacacttttcactatattgtcaggtatgtcaggtaggcagttacagcaaattagggggaactcttctattggcctcggatgctgtctgacagcaatcgaaccctttgattggtggatcgagaggtctgttcatacattcccaaggcttttccctgtagtcacaaaagatgttaggtcacgtacagaggagagcagaacgtggctactaaatggggtaaaagatcccttcaggatactttggctctggatttataacattccaacctcttacacatcattgaagttctaattagtcgatcagccttggcagacacagcttctgtccaggaattcccattcatcccctgaatggtgttttctgaatgagaaataaatgagaagtgtgaaataaatgagaaaatttcagcatgcgtccaagtgaaagtgacaaaatactgaattatctggtagagtatatctagatttaccaaactactattgatacttggggaattgtaatatattcatttcagttgtaatatagaaaatgcccagaacatttaaattggttaatatgtctttactcattcattctgtttccctctccctccctttaccccgttggtaggatatttgatcataatgttacctctctctctctctctctctctctctctctctctctccctctctctctctctctgtgtgtgtgtgtgtgtgtgtgtgtgtgtgtgtgtgtgtgtgtgtttgtgtgtgtgtaaagataactttcaggagtccattatctcctactgcattgtgggtcctgagcaccaaaatgtcctttggcttgaagacaggcaccttgactcaccgagccatctcacctgcctttgagttgcttgtcttaaagatggggacttgtgatgcaaggaggagaatttttagctttagtttttgcttctcctctcaaaccttcccctgatagtttaaggattccatgcttttcacaaggcgtcccctgtaacccctcatacccggcatccccacctttcctctgtgcatgtgaactgacttactggagagtactgcatgtttctgcggaagaatccagactcagcaccgtaagaccaagctgtgggtgacttccaagaaaagaacaaggagatggtcctctggagtgaagggcctctcaagacctttgcaccctgtgttgtgtgacactgttcctagagagacatgataagacatctatctgctcatctcagatagggaaccattacagaccaaagtaaggagaccaccaaagtctgacctagtagaccaatgagttgtattggggttatttacaggaatatgggtaagaggttctttacaaaaaattattcaaagatgtctgcatcagtaaagcctaccccagcatgagtaacagctcatggaagctggaagcctggaaggcactgtactgtgcaacctgcaggaagcttagcaggttggaaggtgtactttccaggtggttcagctggtctgacacttgtccagatagctctgctggtttctgcttcttccaggctgcttatcaaccttgagcctcttctcagccagtccatttatctgagactgtctctcatcaaacctcaatacttaatatcctcttgggaagagaccgggtctagtcaatttgctcaatttctggaacttcctgatgctattttgagttacttcctgagcttaacaggcttctctgtaggatggcatgtttcacctccccttacaacatcctgttgtgtcaccccctgtaaacattttgtcctaagatatcctgctgtttcactgcccttttaacatcccatgtcttgatgagcctccctccaagatagaaggcattaacctgtgaaaaaactgctatacactatacagcaccttggaccactgagatagatttaaaaccctgaagtcttgaataaacctgttgcttctcaccgatttctttcttgtgatgtagtacttttattacttcattgagaacttcactcttatatacaatgcttctttaacttagccaccccctaattcttcctggatccattcatcccagtctatctcctctctctctctctctctctctctctctctctctctctctctctcatgtgtttaataaccaactgaatccaatttgtgggggcatttactatgggaccacacccttaaagaaaactgaatctctgccacttgcttccccaagccatcaactgtcaatagatcctcagctgatagagggggtggggaaagagagacagagacagagacagagacagacggacagacggacggacagacagacagacagaagattgcttataggtccctccccctctccatgctaaaatgatagactggcttgatcttacacaggctttgtgcaggcaaccacagctgctgcaagtcctcgaatgcagagttcctgttgtgcccagatgctgttttgttcaccctggccatccctgacctctgactcttaccacctcttcttccacaattgtccttgaacgtggagaagaatatgatactccacagacttttattctctgcactctgactagttaagagttccgtattaaccaccatctgctactcaaagaaacgtctctgttgatgtctgagagctacattgttctgtgaggtctcccaccaaacttctgtctcctgggttctcaggacagaaataaataatacaaacatcagattccaaacaccaagttatagatgggtttttggatttttttccctatctttctgtttttaacttatatttttctactttttccattttaagtgaaaaatcaccaaagaaaagttttaaattttccataaataggaaaaaagaaagtagttgatagagttcttccatggtggtcagcaattcttaagtataattcacaaacatcccccgaggggcagtaatctatttatggaggcaaagcaggagcccatgggcatataggaacaagctaatgtgccccacatccagaaggggaaggggaagagaggcggcaacaatatttttagaagtgtatagaaacagaaataggctgagaagcaaatgccttgacaagcacatgggaatgagctacaagtgtgcctgggaaacaaatgggccatttaggggtgaggtaaggtgtgtggggcaggctaacaaagcagacacctagacccctggtaagaggaagacagacattgccttcagacaggaatgaaaagggcagtactcaattctcgggttggatggggcgggatgcagagaaagtagttctctcctgcccatcttctctttctaggatattctataaaggttctccggcaatattcttttaaagaatatttgtatttaagtaattttcataaaatatatttctttcaccaaccaaagtttatttgcttattttaaatttgtaaaaaaatataatgctgtctgcttttctgtctaccacagtctttaaaaccattgccagtacaatactacttgaaaaaaattatgcacttttttatgaaatttaaacatactagctagatagtaataagctatttttaaagacttatgaaataattgtagaaaatgctgcaaaattatttttagtgttgaaattgtgtagaatatacaatacagagagtttttttaatcttcaatttaatttaatattttttacttactcactttatattccactcactgcccctgtcctggtcaccccctctcacaatccttctactgtgagtgggtgggagccccactaggtatccccccatcatggcacttcaagtttcttcaaggctaggcacttctcccactgaggccagacaaggcagccagctataagaacatatcccacatgggggcaacagcttttgggatagcccctgctccagttgttggggacccacctgaaaaccaagctatacatctgctacatgtgagcaggcaggcctagatccagcctgtgtatgttctttgattggtgattcatactctaagaaccccaagggtccaggttagttgaccctgttggtcttcctgaggaattcctatccccttcagggcttcaatccttcctcctattctgacataagagttcccaagctccatccactgtttggctatgggtgtctgcatttgtctgagtcagctgctgggtagagcctttcaggacaacatgcccctgttggtgtagttcaggagtctaatgtagatggatgagaggtgataggagggtggagatccccctgggatagcaggatgctcagggcccataagatatactttgatcataagcattaaaaatgaaaaacaaaacaaatgaaaaagataaaaaccatgcctaaacaagacgaaacaacacacacatcaacaaaccttagcatttgttatgtttgttttgggcaaccacccctggcatggggcctaccctggagtatagtaggttaatatacccagtagcacttccttggaaaaaaagctgattgaattttcccctttgccaatgggtaccaactgcaaatagcatcttggttgggtgagtcaccctgtgtctacttgtcccctcatgttgggtctccactgagcttgaacttgtgcagttgtgtatgcttccagtctgtgtgtccatatgtgcttcagtgctctttaggctcatattcaggatagagccaggttttctgctttcctgctcactgtcccttggtggcactgggctttctctccaggatagcaaagaccatcagtgatctttgttactatgtcttcaccctcccatggcacacagaaaaattaagctgcttcctcaaacccctccatatttcttctttcacaatattcctgctctagatcctcaaagccattttcttcagtcaaatcaaccatttatccctcctttctaaagaacccttgcgcacttgttcattcactatttagcataaatcatgttgactcttatatttatcttcccaccaaacttgaaggcagagagtacaactaggtactagtgttcctaggatcctaacacaacacaaaggctttatggcctccacaccccctacagcttaggggaagatgactggtgaagacactggtagagaagggaaatttacaagttggagccaaagggaaataaaatgtcagatggtggcttgttaactcgatggctgttagggccaatatagatttaattctgttctgttacattttagattgggaatgctatggaagaggtggctcactattctataccacaggctcattcattcattcattcattcattcattcattcattcattcctgtattcattcatgcatgtgttcctttacccaggcactattataatatatacactgtaaaatgtactccccgtgtaaaatacttagagagtacactatgtaaaataacaagaaagtatacactttctaaaatgctaagaagataaacagtaagtgtgtaagagaaagcaaggcatagttcctcccttctgagaatttaccaactacagggccaacaaaccaagctataaagaagatgtagattctgtaggttctgacgccagtaaagcacctgtttgtattggcttttcctcccactggaagcacccataagcactaaaaagatacaagggacatctgtctgtgggttctcaggcagccaagatgaaagaacccagaaattgagcagagaagaaaagccagcgagataactcagacactttgcgcaggtttctcacgcaagcctggttccttaaatagcatgggggtagagagcctgtgaagtttaccaggaagtgtctagaaaacaaaaactgagcccaaaattcaattgacttatggaatagggaaagaaaaggtagaaattcagggccactgagagaacgggatgcttcagggaggagtacagcaatgaggggcttcgcctctcaacgtgttcactaattaacaaacagaaacagagaaagtgaacccggaacctaaagctgggtaagcagagatcaacagagacacagagttctctacagggaggacctactccataaatgctctggcttgcagctagctcattccaaggacaacacccaagaagggaggactctgaaatagaaggactcttttttactaaaggcttctgaagaaatccaacctctgaacacttaatctggactagattcaaggcactgccctcattttagcacctttatagatgctgacgactcatctgaaaccttcctaatcttctttataaagtgtttatttaatcaaaattaacaaacataccaagaagcagaaccaagcaacagataatagaggcagaggcataaatgatccagacatcaaagaggtcagatatggactctgaaatagccatgattagcgtatctgagacaacagatttctgacttctcaaggaactggcatttgaatccatctgtgaagaatccttcagagctcagcctagcaaatacataacaaagagttcagatgcagctcattccaggcaaagagcaagtctgaaggacaagagcacaggaagaaatggtgacacacactgacttggggtaaggaggagagggtgtggagttgaggctgaccttccaaaaggaaatggccaattgacctccatttccccagaaaatcagttatggtgattaagcctaccagtggtcaggaccatatcaagttcaggaaagagataaagagaataaaagaacacttaatttcatttatctgttttaggatttcttcagtaaatcagacccatttctggaaattttcagaatgaacgatgacgcgactcaacagcttgtgcatcgaacagaggtaagatgtgtgcgctctgcctctgagaccagtaatgcccttgtaaagaatttttgtacatgatttccaatttttaaaagctaaaatatagttataccatttcccccttccctgtcctccctccaaccctttccatgtgccccttggctctctcttaaatttgtggctctttttctgtagctcttgtgtgtgcacacgtgtgtgtgtgtgcatgcatgcatgttaccttaaatatagaactacagtctgcttaatccataaaatgttgcttgtacaatttcagaactgacacttggtattggaaagtcaattgccggactcttcttcaggaaagactattcctccagctctcactgttatttgttgcctatagttctttgtctagggttggccatgggacatcctatttctttttttttttcccaatttttaattaggtattttcttcatttatatttcaaatgctatcccgaaagtcccacataccaccacccccccactcccctacccacccactcccacttcttggccctgttgttcccttgtactggcatcctagttcttgttagcttactgcttgtagacagacagacctggggcctcctctctccttgagatgatcctccacatttttggtttgggtgtttactctgattttctaacgttggagaaaattctcctctctagatgcaacgtcctatagttgactttcaacacagccaagcagcaatgcatttatcataaattaggaacactagagctggcaagtcactgggcctaggtgagctcctcacccattctccctccaaccggatccctgttcactgcttttattatccctgtgcccaaatactcggcagaagcaatggaaaggatgaaggctttgcttttgttctcaaggaattctgcccacatgggagaggaagcagaggggctcaattacatctgaaggattaggaggcaggaccctgccttgtgggcaatttctcccaactaggcagtattttccaaagtttccacaagctctcaaaagatgataccaactaggaacaaagtattcaaatatattcgtctatgggagaaatttcagagctattacagattttaatccttatccttctctaccctaaatgcctggtacaattctcttatatgcacaggcaatgcttatgatggttaatatcccattgtcacttgatgggatttagaatcacctaaagaaaaaannnnnnnnnnnnnnnnnnnnnnnnnnnnnnnnnnnnnnnnnnnnnnnnnnnnnnnnnnnnnnnnnnnnnnnnnnnnnnnnnnnnnntccccctccctccctccctctgctattgatttccccaaacctttcactccttaacattgtcctaaataagcacagaatatattaaccaattctccttctcacagaaatttggtcatgcccagggtattaggagacaagacaaactcacgaaggaacattgtttctgtattttaatacattaaaataaatctaataatgaatctgtgatcacatcaataatccataattatagtaaggaagaagtgggaatcatttatgaaataattactctatttggagacagaatatttttttccaaaaccaaaatccacaaagacttctacctaaaaacttcataaattaacacagcagatttcatttaatagtttaattttatttggatgccctcttaagtttcattcagtagataacataaaagatcttcaaaaatgtctgcttataggactaggtggcgctcagaatttgtgcttgcaagaagtccccagtaacatagcacctactggtccatgaatcacactctggtagcccctactctaaagtacatgcctggtacacaggaaccacttatacaccctgaagcgagccggatcattcaaaacaaaacaaaggcaggaaaaatctcatggactcttaggcaatatttagccaagttcatgattaataagctgattttaaaaatacattttcgctatattattggttaactttataatctgaagaattaccaggttatatctttccaaatattctaattgagatagtgtttggctaatgtaaagttgagtattcttcatctagaaaattctcagactctccatttgatataactcatagacttccaaagctctcaacacacactcacacacaaacacacacacaaacacacacacaaacacacacaaacacacacaaacacacacacataaacacacacacacacatatcttagccctctttcactttcactgggtgcccagcaatctcacctcctactttgatgttttcttgtgtgcttgtgtgagctgttgtgtttaattaggactgctcacatgagcgtgcttgtgaggttgttcactggagcatggacaactgaccaggatccacaccacaagcctaatggactcccctgaccccagcaatcactaactgctcacagcccctcagctagaggtggtgatgttttcagcagtacctttccatccatcccagatacctttcctctgctgactccaagggaaaggaatccatatggtaagactaatggtccttcaggaccggggaatcctttatcagtggccagaggcagccttgcctcaaccccaggcctttagatatagaagaggttatcttctatatccacatgctgggcaatgtcactgtccttattcatgaaacaatatcgaggccagagaacacagtggttctgcccataatgacctacttcagggccactcttaaaatacccactgtcctcaagtttgcatcaagccacctgtcccagatgcgtgtccttttcataaacagcacagtggcttctcgagtcattttcctgttggagtatgaaaatgtcaagcctttcctcttcaaatcactattcatctctttctcttcccaggttgtgatgaataacttaagcccagcctggaagtcattcaaagtatcggtaaactctctatgcagtggagatccagaccgcaggctgaaggttagatcctatctgagagatgtgaatttgaaaatgtattgcactgcacttgcttcttctctcccatgaaccagggcatgcagaattttctgtgccactctcccaaacctctcaccttttagcatcttaatggaagaaagtgaggctgtttcttcttccagagctatcaacacacatacaatagccctaaaataaatcctaatgtattatgtcaaaagacagtgcctggggtgtttcagaaacaaaatgtggcaataacttcagagtataattgaaagtttctggaaagaaaatatttctgcatcaagtatctattgttatataatgtattactctacacacacacacacacacacacacacacacacacacacacacacacgtgtggtagtttgaggtagtaaatgtgtttagcttataactctgtgcatgggcaaacagggtggttcatagacaatctaggtgattcttaggtattcttggtctctgtgaggcactcatggtctgctgcccatgaatgggttgacttctaggggttggtaggcagtgcatgtgtgtgtgtgggggggggggtgtcttagtccttgtcatcagtccttgctggtacagtccagtattctcaaactcctgacatttccacagtgcctaaaagacttgttaaaataggaatggctgagcttcacctgcaaccccaagtttcagattcaggggatacagaataggcataagaatctgcatttttgtcaggcttcccaatgggagtcatgctcctgttccagtgaccacgctttttgagattaagcgtcggcagctttcactagtttccactctacccttctctgctcctctttactggcttcctccctgccaccctctctctgtgcagtgctcagacccaggctgtacaccctgcacatgcaggagaaatgacagtcagctctctgctttggaggctgtccttattcttctgcctttccttgagcacactgtttgcttctgagtctcttcaatctcctcccgcttgcagaacgccttcctggtggcgctaacatctatggggtgcttcctagccttatttaccaatactttcttagcccttgtagtgggcagtgagtgtgggcgcatgcgtctgagtatatgcatatgtgtattgttctttgggtgatgtcaaccttcaaaaaacaaaacaaggtctctctggggaccaaccccaaatcctcaaagcgctttgcagaatgcgctgtctcatcagttcagaagcttcctgcagatgtctctgtcttcccggctgacgctgcttctccacacagtcagcatctgttccctgtgcatccagacatctaccacatccaggccctgcctggagttcctgcagtaatggcttctggccttaacctgtgctaggaaagctgctctaatagggaggttggcaggctaggcctagccccattgtgaagaggcttccctacctcccactgctgagctggccctgcagtggcactcagccgctcactgtaacgttggctcttctgaaaggtgggatgggttcttatgcggccttttatttatattcgttggttcttttgcttcgagagcagccatgaaattctagtatggcttctccaaatactgcagtgccaagctgccagaccagagctctaatcatatgggtgtcatcttcccaaccaacaaaattgaaaattggaatgtcctaaaccatctatcaggctagattttaaatcctaacttgataatgaaggctttcgttccaaagcatcctttcagtgtctttcttagtgacgcagcatctacgtgaacatcaacgttaagtagctagcagcttctccatttgtttgttttcctctccatgataaaagtcaaaacagtgactggatgacacttttgaaattgatttatgtattcaatatgaaagtatttaagtacacaggcagtttaaagagtgctgagaccttctcccctccccctcccccacccccataccatcccacagcttcggaaatcattactcatggccagcttcctgtcatcacgccctgatgttccctgtcactcacaccgctgggccatcttgaaccgaggtgagcaggcagaaggcccacaatgctctcaggtgcccctcccccaaatttctctgagtccttttaaaagaatagatgtcttgaatcagatcaaatacttatgtttttgctacatcataagatgatgacgttctaaaggcctgtggtaagctactatagaaagccataaaggggcagggtagagcctgaggccaagcaatagtatgccatggtgttatttagcaaccacatttcctgatgtgaaaatactccaggatgtaccaccaaaggatgaaggaccttccagtaaacacaactagaaaactctctcatgcccaagactgttacctggaagcatttaatgccattagataccttgccacctgcgcatatctgcctctctgctagtgatttgctaacctctgaaacagttggattttctgttctatgtgtgtgtgtgtgtgtgtgtgtgtgtgtgtgtgtgtgtgtgtgtgtgtgtgcgtgtgtgctgtatgtgctcacatgtgtcaggtgcacacacccaaatagatactgaggaggatgtggggtatccttctctatcaccttgcacgttggtcccctgagacaaaatctctcactaaatctggagctaggctgagagccagcaagttccacctgtcctttctctgcctcacccacccatacacagcgctgggcctgcaggcacagcgcttgagaccatacatgagggccagggatttgaactcatgtctgttcaacaagcactcttacccactgagacatctcataggtcccggttatcttggttttacagtaggctttaaaccatgcccagggtgaaaatgaggctcttttaatgagttagttgttgctccctctttgtatgtttagtcttgttttgtgtgaggtttctttaaaggaaaaaaaaggcagactagtgtgtcctgaagtgtttttctacattctgtttcctataaatgggtcactggggccaagttctgattttgagcaacaatgcccctggtgttattaagaattcatgggattttttatgtgaatgtttcagtctatttccacgattattaatcttttcacacactctatcattatgtctttgagcaaggagaactcctttaagttggcccttgaattcttcaagctcaaacttcataagtgggtacttaaaggtttccttgcttcctagaccaaagctttgagatcatcaatttaaaagttctataatttctttctccctaggacataactttatgtggatgtcaagttgttggctatctcttgaactcattcctcctgtatttatttattagaagatgaatcaccatgatgagcatgtttttgacttgagcaaaatgcttcattttctgtcattgaaacatttaacaagaaaaatgtctacatgtaagatattttatgaggtctgaaaccctgaatcacttaatgttccattaaaggaaaataatctccaaaaaacccaattcaatgaaatgtgatagtcatcagttcttttgatttgatcaacacactgatccgaaacaagtcatgaattttagagacagtgtgcttctcagaagagagtcttccagatttgggggggtggtcttagagaaggagagggttggggagcaccattggcaagcatttattgacatcataatgtgcttagtactgagaggagaggccacatcagagcaggcttgacaaataccacctgctcacactgagaactttgaaccacctatactaaagggacagatcctctcttttttcaatatattagttacacagatgatttggagactcccctctataaagtgtatgcgaattccttcaagtaagtgttgatgaaagctagctgctttgagagtggcaagcaaggggcccagactgttattctaaggtgggcacagagaaaacatagtcaggtaatcagcagtaacagaaagcagggagcagtgtcctcttaaaactaaaattaaagagaagtcagacccatgagagtgagaaaggaagcccaaatacccatcaaaagtgaccatcaaacaataatgttgcccacacctgttttgttcatctgtcacctcctcctttttggctgccacgctgattgacttaataagacagccacagttacaagttgccatctgacactcccaaagttgggacttgtgaacgatccctaaagtgttctcttaagtcaaaatcccagctcattaaggctggaatcttcctttttaaactcataaatcgtactagacacaaccatttgcttagcctgcattaagagacaccatctccttactgccaacttgtttcaggttccgcccttcagcagttcattatttttctgccatcttaacacaaagctaagtgcacatgtctctgtgtgttctttccactctataaaatcatttgcatttgttctttcactagtccaactatctgcatcttccccttctaactgtggccagcctgtcttgagttgaaattgtattttctccctaagttccactattcttccttggactctctgagtcaaaatgatatgcaattgcctaatgagttgagttgggactgccctccagtatgttcttagtttgctttggacctttgctttttatcccgtccctgaaaacccattacctttaacctatctccatcctgtaaatagtcttgcattacttattgttgatttcctctaataaatctgtattttactgcctgagaaggatgatactacattgcaatttaaatccctccaaagcttagtccttaatagtgacccccattcagttccataaaaccccaaatctatagcatggggattggtcaacattttctggggttttggtgcatgcaaaccacaggcaacttgacttgaagggaccattaatgtgatcagaattactggcaatggtaattaagagcctggcattattagacagtttaatgcaaccttacttctctttctattgctgtatagctatgaaggggatgtccatggtcttattatattttcttgaaatctgttcaaattcaagtgcttccctcatagccttggggactcagggctgttggtcttgtgcctgtcaatcattcactctgccaaaatgttcagaagtttacaggaggcttcaagtctcatccaagtctctcttgattcaattgtctgtgtctctggaattcttaactccacttgagtaaatggtgcccctgatccatgattctccctgagaatctgtaatcaataccacagtgtggaaagcagtgttcaataatgcaggaatcgggcaggcttgtgaactgatggggacatggcctcctcgttttaatatttcttccttttcattaatattgttctccttcacaaatgaggatcagagactctgctttgtagaaaataatctaagatttgcagcttaaataagcaaaatcttaccttaaaccagagcttcccgtgcctttttgtctctgctaaacaacagataatatgtactgagtgcgtgccaggctccaggaactatgctgggtaggcccttggcttaagttttctcactgaactctgcaattaccttagcttaaacaatccagcagggggctagagagatggctcagtggggaaagtgcttgctgtgtagacataagggcctgaattggggtccctagaatccaggtaaagggcaggcacaactgtatatatctataaccccagcactggaggatgacacagaagagaggatctctcagcccattggccagttagtctaggtgaaccagtactgagcttcaggctcagagagagaccttgtctcaaaactcaagtgagagagaaattcaagaagacactggtgtcttctgccaacatacacacgtgcacacatataaaagaaaatctaaaaggcaaacacatagtatagcaaagaacctccatgtatcaagtttatttcttgcttataaagcaagtacagataaaaaaattcaaaacaatgtctgtttcttcatgattcaagaacccaggttccctctgggtgtggtggcacaaacctttaatccaatgactgggaaggtagatctctgagtttgaagccaccctggtctacatagctagttctagactagccaagactacataaccagaccctggagagaactcttgggagtggtactcaggttcctcgtacctatggctcacaccctcatttacttccaggaaaacagaaaaagaaagctttgtgcctgaaaccagttactggaactcagtaacagctcagtcacacggagcagccaggcagactgaacaatatagtctagttagatgcctataaagaaaaagaaagagatttgtgtaactggttgtttgacttcccttagggtttcattgctgtgaagagacaccatagcctaggcaactcttataaagaacaacattgaattagggttggtttacaggttcagaggttcggtccattatcatcatggtgagaagcatgacagcatccaggcaagcatggtgctggagaaggagctgagaaatctacatcttattccaaagggaaccaggagaagactggcatccagacagccggggtgtggcatgtctccaaacccaccccctcagtgacatactttctccaacaaggtcacacctactccaacaaggctatacctcctaatagtgccactccttgggccaagcatatccaaactaccacattccactccctggtccccataggcttattctaactcatgagtctatgggggtcatacctagccatagcataatacagaatatatttagtccagcttccaaagtcccatagtctataacagtctcaacactgttcaaagttcaaagttcaaagtctcttctgagattcatccgatgacctaaatgtaatcccctaactttcatatggagaaatgttttttattgcccactgtgtagatgagaagtctggggctcagaagaagaaaatagtattctaacacctagatccacaacgtttttaagtggcatgaacaaaatcaagtcgatctgacttttgagctgaatttcacaacagtatgatacaataaaatgttgtgaaggggaagataggtaagctgtaggaagtgtgcatcagacccaaaggctccatagaacacttatgtcatgcagatgttccaagttcactcgtgttaattggaagaagatgactttacctaagcctgcaagttccgaggagcagttgactgaacagacacatctggccagaccagttacctcccagccatttcttctctttcagcaccttcctattttgcttgtcctgtgttaataacccattcctctttccccaaacatcatcctttcatccacggagcaggaaattgcccttcttcctgccccaggctcctgctgccaatgagagtcttctgctgcatattgtatttagtaattctaaaagggaaagggggatgatgtctcctacaaatgggctcagcagtgggtgctgcttacttcaataatgaagtgatgcttctatcactgagaatcagaggggtcagaggaggagagagggagaaggaaagacagagggaaagagagagagacagagagactaccttcccaaagcaagacctgttttgtctaggaatccagcaaattggatttacataaagcttaagctatggagctggtatttaatggtcataaagttttagtgaggaagacagatcatgtcttgtggtgagcaatgataatggttataccacaatgcaatcatacttaatgctgcagagctatgtgcttcaaaacaatttgatggcaaatgtagtatgataaatcttttaccacaataaataagtaatcttccagttaacttgagtgaacttgaagcatctacccagcatcagtgttctatggggcctttggctcctacccctacttcctacagcttacctattcttgctctgtcagtcacctagcagctccctaaagattccttcggacactggagttcttctgtttcataaatcctctgcccagtcattatgaatgaagagtacagtggaggcagcaccaataccccactcttcttctctccacaaatcatcccttctaacatctattgagtagacccacccaccccctgtctctgtgtgatatccctgaagctaatggaagccctcttcaggctgttgtattaagaaactacaaagggggaagatcagccccaggtactacttctatactaagataatgacacagaaatccaactattttattggcaaaattgcccagggctatggcatgtctttaactgtctgccaagaataacctgccaggacttgactggttcaaacagtggttttgaagaaatcacttcagttgtgaactaagagccctgagcgagcactagtcatgtctctggtgaggtctccagatgataagagatgagaggcctcttgtccttctgagtaccttgtctcccaattacagactgcatccactgttctgtttcctcatatttatcctacttacagccaattctacgcagaaaagcggtaggtgcccagtttgggggatgaaatcagaggaacgacgggaagctgaatgatgataagaaacactgttgtgatttgaatctaaaaagccctccatggactcttgtgtgggtggctcagttccccacgtgtagtgctaatttaaaggctctggcgtctttaggtgtggagttggggcttacctggtggaagcggatcactagcatttgaaggttccacccagctctggttccagagtttcccagtcaccaggtaaggagtctctcccatgcactcactccatcatttactaactctgcagtaccttctgcactgtgatccactgaagccctctgataccaggagccaaggcaagccttcctgctttcaagctgcttctgccagatgttttctcatagtgatgaggaaagtagctaatagagaaaggaagagagtggggattctgggaatcccttaatacagctgtcataggttgattctatttgtagtacaataggacaattctagttgtagtatggcaatctgttactggtaaggctgatgctgtgtgccggccactttcgtggctcattcttgagtttatttgttagttggtttgtttgcgtgctaatctaagcctttcatgttctcatctattgtactattttgttaacactgcaactgaaaacattgcctccaaagatttcaatgtttattactgcacagttggaagtgtttttaacctgaccttgttgataggaaggtcaggatggagtcggcttcctaggaggcatttgtcactgagtcaggtctgtggggtgtgcatacagctccactctcacaacttaagcattcactaacaatgtggtttgggggtgggggtgggggacatcacagtttatggctattctgtaaggttttctccagaaaaatattttcaatagaatctacaaacaaaacagaaagagagttatctctgaggaataacatcagccttgatgaagagagtccttgagactgggggaaggatcctcattccactgcttagcagagcaatcccagaggcctcctcgggagctggaggagatagtagaaatagctcctctcataagtgcagtgttcctgagatctcacatgcctgcaacatccttggtcttcaaagcagggccgaggaaggtcaaggctatgccaggtatgtgagcatgaaacagattccttaaactgaacattaaggaagaaaacaggaaagttctcactaacctcttaggaaattatttgcccccgagaattaccgtcttttgggatctcaaactctagaaaggaacaataaatgtttcctgactctcccaataaagagaggaaacagtgccgtgaccagccacacctggacctcatgcagctggagataaaagagtaagagaagagagatgcctcctcatgctgtctacagaggcttctcgtgtttgggattcccagcaagcaactggtctagactcgagcttcttcaatgaaaggagtccggctgtgtccaactacttgacaggatctggaagaattgactcagaataaggaaatatgtaattccagaggccataattctaatttataagaaattcttaaaatgttaataaattgactagaccaaaaaatatatatatattcctcacattccatatagagatgggccttcccttgtatctgaacgttagtaactagagcccagttgacccaacctcaagggctctctttataaaatctggtgttcttcctcagagataactctcctggtgccttatttgaaggttctgttaaaggtgcattccagagagaaatgcccagcataaccttagattgtggttcccctcctgctcagtaaaccacattcctacttagtacttatgctgtgcggggagcagctgcacgcctgccctgcagacctgactcggaagcaaatgtctctcagctctccagtcagctccatctctgaagatcttcctgccaacaaggtcagagtaaaaatctttcccactgtgaagaagtaaacattgaagtctttcaaggcaacttttccagacctctgatttggacaatgaatgacacttctcacaatataatgctgatacagtaagaaagcagtatttgcattggacttcaaagtgattatgtttactgtgttgtatccagctcattaattacagagaaaagcaaggagatgataaacctgagcattttccaggaattcagtttacacatctttccctcgaaacgtgactagagctaagatttcttttttctttaatcctgcctctttttaaatgattttttgataattccatatatgcatccttattactgtcacctcccacccacttatctctctcccacctcagccatcctccctcctccctcctccctccaagttcctttcccacagtctcttcttttggtctcttgattttagtcaggaccatttgtgtgacaataggtttagaatagtccgctggggcctcctgggctccttccttagtgagtacaacacctcccctagccatcaatagccagtagttcagcagacagtagtagagtccatgagggtccatgagcctctccccaatccccaattgtctgttgagaagcacagtcatgtacaggcccggtgcaggcaactatagctgctgtgagattgtatttgcaacagctgtgtcatgcccccatgacagccttttccagcctacctctctatcgtctgtcacttacattctttctgttccctcttctgtgttgctccctgactcttaatggctgtggtataaatgttgtttagagctactaactgctgcttagctatccattattctcagcaccttgagcagccatgagtctctctgccttcaccaccactcacaaagcacttctctgattaggacttagagtagcacttatctaagagtataacaaaaaaatatttaaagggagtttggggccatgtcaatttagctgaatatcaatagtaaactcacacactccccaaacccatacaaaagcctcctcggcactgagtttttaactgagaatagagtaccaaccatgaagtcctccttatggagcgagcctaaaatccagtgtaagagtgattggttatcaccaaactcactgtaccaccgttgtctctattacacatctcgtgtggcatgtcggcattgtggttcataaagatcacagctggataagaccactgattctgtttctttcctagcggcagggataatatctttaaatgttatgaaagccagccagtaggagaaaacttctaggtcagttacagctcaacttctctgtatttttcaactgaagtatgtggtgtcttcggcaatagagccttatcacttagttttggtgagcaaccaagtggaatggcaagagcctatattgtttggagcttctcttgagtctccctgaccagatactattccatacttgctactggaattttttaatattctgtggctcctaggagtaatattgtctaatagcgtagggaattactttctaactcccttttttaaacctgtgtttttaattggtttgcaaagtagcatgattctatatggtttttcatatacccttctcttggctagcactcactcccagcccccttgtctcccctgtgctcctaccctaccctgagtacccccaccccatcctgcttaaacctttctgctatcaaaattttttctttacttccatatcatctataaagaactaagatttctacatataaaatagattaatgtccttcaggacaatcaactataaatgttgcactcatctttgttattggacataaggtattacattgtacacacgtgtagctacatacacacctgcaaatagatcaacatgtatatttatagagtctgagtccttaattaaagtagtaaactttgaaatcaagctatatgttcttgtaaggaaataaattacccttggaaggacctgttaaacaaagtttcttcatggcgttgaaagaatgtgtagccacacccatgtgcttaagtctacattgtgattaatgttcttaacatattcaaataaccccttgagttcacacatctaaagccagatgtaaacctgacatcctcatctgttcttcaagcattttgtccctgtctctgcatggctagcaagttcttcacctctgtgtatcagttcaggagccagctactcagacacgatcacacatgtcattcataatccaatcactgccgcctcatcacctattcatctccttcaaagcaggtacggtcgtctgctaccgtcttgcgtacttacatgcatgcttacggtttgtctcctcgaccaaagtattagtggcacggtccaagggagagaaactgacttccttcatctaagcagtgcttagcctttttctactgtaatcttcataagtatattaatggatgaatgtgaggtggatgaatggatgtcaaagcctgtagtaaggttttactatttgtcctgaccttttaaaatctcccaggggaataaaatactccttaattttgtaatcttgtgtgtgtgtgtgtgtgtgtgtgtgtgtgtatgtgtgtgtgtgtgtgttgactctaatgttggacctgggacacttgctgtgacctatagcaagtctaaattcaacatgcaaacacttctcattgcgtctcaggggatatcccccactgaaatatgctattaccatattctttccaacgagtttcctcattaccagatgttatttcccaccaccagccccaggatacagggaggaaggaggcaaaggggaagcatgccttcaggactgagggcttacagagtgagtcccacaaagaagaaagttttcttgaccagaactgactctctgagctcagctttggaggatacagagactaaattctcctcagaaaagaagggaggatggaggctgctttgtggatttttccaaatgtcaggtccctttcgtttcagtgccgcatcttgtacttggctccctttgaacagtttctgaaatgacataaaccaagtctagagctaagaatgataaatcctggcttacccttaagccatgaggtgttcagtggaataaatcaggagagggggcagggtgggtgagacaaacaggattcaattaaaagtcttgaagagagtgagagccatcctggagaacctgggccttaaagcttttctacaacctactccttcctctctcacccctcccttctctctcccttagcagttaagcctgcacccagcatgcctgattgcactgacatttaaaacacattatggcagacatcccatggaagaataaaatcactaaatggacttgtcaggaggcattctgtccagctcatctcccctgcggaccagctggcctgattcattggctctcttacaacctcctcaactctgctacttccaatcacgaaatcaactcttgaaggcccatgatataccagagtacaacggactttcggatggttgaggtcagcatggaatcccaaacaatgctgccaatttccagcagcatcagagtcacctggagagcttgttaaaacaggaattcctgagtttctggcacagcagggattggagcccgagaatgtacatggctaataggttcccgggtgccactgatgctgctggccatccacatttagagaattaataataatggagaaaggagccactgccgtaatattatattgtcttcaagccttgcaattctttatatctgcatccattactgtttatcccccaaatcagcacttcgttccagtagctcacatgatatccttccaccagcaggcactgacacaagcatttgaacactaggaggaggctctgtagttttctgtcagctgggggctccagccttcccatgacccatattttggtctggacaattgcgtgtccagacatttactaacatcttacttgcacagtaagtaggtaggtaacttactgtgcaaagtaagatgtgcaataagcatctgctcggtcgttgaggctcccatccggacaagccagctgctcccagtgtaggctgagatcctggaactaaaagtgcacatttaatctcttgcactttgggggactttaagggtgaaaattcatttcaacccatcttgaattcggtccaattgaaaggtaaagacataactcaaaaacatggcaatcaaaatgtcactttggtgctgataatcctggtccctgatgcccaggtaggaaagtctcctaggagactttgggctctgatgaacaatagtgtcaggcactgcgatgcatatttgtggaatcctagcactttagagctggaagcaggatgatgaggtaatcaaaaccattcttgtctacataagaccttgccttgaagataacatcaagtgagagaagccatagctacttttaggataggaagacgagggctttagaaatgccagattcccactgtgtacatgggcatccagtagcctgagaagcataagtcaaccttggatatatattacaaccacctggcgagcataagaaaaacatgggttccctggcctccacctcagaacaactaagtaaaattctctgggaaaagatggcagaaattcttagatgtagccagagtaatctagcaaggtgaaggtccactgcttaagtgaatagactgggacattttgatccctttttctgatttattttcacagctgaggattgagcccagggcttcaagcatgcactcaggagatgagctcacaccatttttagctttggtagctagagtcccactgtgttgtagagagtgggatcaaaattagtcctgcttcagcctcttgagtagccaggacaacatgccaccatgttcccaccatgtctggcttttgtgttgggagccttttctgaaaaatcagcgaggaaagcaaccacctagactaatgcaccattgccccgaaagccttctaagactcttccagtcaatgagtcatcaaattctgctgccatgtaagtggcaaagtagctggcaagagcactgagggtttgcataggaagcttcaggggttttctgggacaataccatgtgtaggattctgtgtcccaaaggcctggggctttgtaatgaaaaggctggaggttatattattttaatgtgttgccagggactccaagaacagttaggagattacaaagttagtaagttaggtacagcctgtgtttcagcttaagaattttaggtttttatcccaggcaatgagaagcagcagttctgtgaggaaaggtgatgagatggtgtttgagctcttagctggaacttggagggagaaaggataaagttgagatgggcaatccagttcatggcaatggaagatgatcagaactcggccccaaattgtatgctggatatagggagaaggaaaggagaaactagaatgagtctctgattcttggttcactaacatgtgtggagaagggaccatactataatatgagacactggaagaacaggtttggggtgggaaaggtaagttttggttcatagttgctgagtttaaggtgtttctgagactttcagtagacagcccagaatttcccttacataagtgcaggaagccataaagtcctgaacaaaccaggataactgtttaacatggcaattggcttaatgaatttgactctcagaaaagagatctaagttggggcacacatgtaagactcagtaaacatgcatgtatatagtcatatatatgcatatatatatatatgactataagaaaacacatcaaaatgtatttctcagtggcaaaattgcaaaaaaatagtttctttttaattttctaccttcaaatgtgttacatttgcagtgaggaaaaggaaaacactcgtttaaaatccccacacgtttttaatatacatgccaatgtgttatatttacttagacctttttagttcctatttaaaaattcaaaattgaattgactatttttaaagtccccagtgggtttttctgatgatgagcaagtgtggcctatttttgtagagtgacattatgcaaagttttccagtttgccctaatctccacttaaattcagtgtctgtagaggcccaaagtaacttgccaataaagtgaccacttgatatggatgcaaacagcaaaggctgtcagcctccaaagctttgttagtttctaaaaatgagttcgtcttctaacacacttcagtcttattcattcccggtgatcaataatctagggagctggctcagccatcaagagtgcttgttgctcttgcagaggaccagagtgtggtcccaagcacccatgtccggtgtcccacacatgtgcatataaacacacacacatgtacgcatgcacacacacattcacgtacacacatggaataaagcttttcaatctgtttgagactataccacagcacttatttctgaagcttgtggtcattactgtcattgactattctttaagacaaatacgtcaggaatgataacataagtcttcagctgaagtgagagatggaaactaatgttcagtggctctgatatggaaagtcttggattctttagatgactgagggataggaaccttaaggcagcccaaccattttattatcccagcaacaaaaactgtgagatctagcaacgagaaatggcttgctatgtgccacgaggctcattagaagtcaaaacaagaccttaatatggatttatagatgaaatgtgctcttgctgtggagcagaaatgatttgggtactttcccttaatccataccacaagccttcaaggttagcatagaaagaagctggagcccagagaactgagtaagctcctttaaaaatcacagatctctcaaagtcagaacctgaagcccaggtctggttgagtcccaagttcattttacatttactaaagtgccccaagactctgtgatccttctcttcggacacactaccttcctaagggtgagagaacaggttaaacctctgtccttaagtgaaagggggaagtgtcacatttatttatcagctgtgctcagtgtttaaaggatgagggaagaggataaatgccaacaacctgactataatttaataggaaggtgaagggcccttaaaggcgaacaaccaggaaacaggaacctcgagggctgtcctaagcttgttctaaaagccaaggactctgtagatatgggggagacattatgtaaggaagggtagagaggagagggcaccttgaacattctttctttttcttctaagtctgagatcaaagaggaagaaacagttttcttcctatacctgtattgtactaactgtactgcgttccaagacctcccagggttttcccattttgcagatgcaaaacagaaagatagattcaattatttgtacaggatatcatgaatgattttcaaaaggtgggaggagactacaaggaaaggagctattaattaattgcatgattaattaattaattacatatctctactcttatgggactagtttgtgaattttatccaataggagaatttttatgatgtagaaaaattagcacaaacgaaagcactaataattaatattttcttccttttccataaccacattacacataccctaggctggccctcatgattcctgtctcctaccatctttgcataatctcatgcttttaaatgtggatgggacctgttgctttcagctatcaatagctgtggtgataatgatatgccatcctgtggttctgtcttattctatggcaaagatgaaggtatagctgggataccacatctgtccattttgatgtaataaaagagctgattatgggaagccctttcaaagagggttcagggagtcccagatgtcagagactataagcctccctgttgctggcttctagaaaaccaggtacaatgaaactaattctgcctacagtcccagagaggctaaaagtcaacactttcctagttaagcatctaggtgaagtcaggccaatccctccattctgccctgaacaagaccccagatgatgaaagcaatgagtggactctgagatacaaaattgtgagataacaaatgagtattcttttgatgcaagccgttatccaacactatagttaatgttacgtttacagttaatgttaaatggttgcttgttgcctttgattaaggaaggtcaagttcaaaataggaggttctacattctggcacagttgcctctaagttggtcattggcctcaagaacttacatattctaggcaagtgttccaccatggagtggcattcccaggcccattctattttattttctattttattttattttactttatttttttgtgtgtgttttattcttgagattgaatatttctgagttgtccaggctatccttgaattcactctataggccaagtatatcctttttttctttattttctttatttacatttcaaatgttnnnnnnnnnnnnnnnnnnnnnnnnnnnnnnnnnnnnnnnnnnnnnnnnnnnnnnnnnnnnnnnnnnnnnnnnnnnnnnnnnnnnnnnnnnnnnnnnnnnnnnnnnnnnnnnnnnnnnnnnnnnnnnnnnnnnnnnnnnnnnnnnnnnnnnnnnnnnnnnnnnnnnnnnnnnnnnnnnnnnnnnnnnnnnnnnnnnnnnnnnnnnnnnnnnnnnnnnnnnnnnnnnnnnnnnnnnnnnnnnnnnnnnnnnnnnnnnnnnnnnnnnnnnnnnnnnnnnnnnnnnnnnnnnnnnnnnnnnnnnnnnnnnnnnnnnnnnnnnnnnnnnnnnnnnnnnnnnnnnnnnnnnnnnnnnnnnnnnnnnnnnnnnnnnnnnnnnnnnnnnnnnnnnnnnnnnnnnnnnnnnnnnnnnnnnnnnnnnnnnnnnnnnnnnnnnnnnnnnnnnnnnnnnnnnnnnnnnnnnnnnnnnnnnnnnnnnnnnnnnnnnnnnnnnnnnnnnnnnnnnnnnnnnnnnnnnnnnnnnnnnnnnnnnnnnnnnnnnnnnnnnnnnnnnnnnnnnnnnnnnnnnnnnnnnnnnnnnnnnnnnnnnnnnnnnnnnnnnnnnnnnnnnnnnnnnnnnnnnnnnnnnnnnnnnnnnnnnnnnnnnnnnnnnnnnnnnnnnnnnnnnnnnnnnnnnnnnnnnnnnnnnnnnnnnnnnnnnnnnnnnnnnnnnnnnnnnnnnnnnnnnnnnnnnnnnnnnnnnnnnnnnnnnnnnnnnnnnnnnnnnnnnnnnnnnnnnnnnnnnnnnnnnnnnnnnnnnnnnnnnnnnnnnnnnnnnnnnnnnnnnnnnnnnnnnnnnnnnnnnnnnnnnnnnnnnnnnnnnnnnnnnnnnnnnnnnnnnnnnnnnnnnnnnnnnnnnnnnnnnnnnnnnnnnnnnnnnnnnnnnnnnnnnnnnnnnnnnnnnnnnnnnnnnnnnnnnnnnnnnnnnnnnnnnnnnnnnnnnnnnnnnnnnnnnnnnnnnnnnnnnnnnnnnnnnnnnnnnnnnnnnnnnnnnnnnnnnnnnnnnnnnnnnnnnnnnnnnnnnnnnnnnnnnnnnnnnnnnnnnnnnnnnnnnnnnnnnnnnnnnnnnnnnnnnnnnnnnnnnnnnnnnnnnnnnnnnnnnnnnnnnnnnnnnnnnnnnnnnnnnnnnnnnnnnnnnnnnnnnnnnnnnnnnnnnnnnnnnnnnnnnnnnnnnnnnnnnnnnnnnnnnnnnnnnnnnnnnnnnnnnnnnnnnnnnnnnnnnnnnnnnnnnnnnnnnnnnnnnnnnnnnnnnnnnnnnnnnnnnnnnnnnnnnnnnnnnnnnnnnnnnnnnnnnnnnnnnnnnnnnnnnnnnnnnnnnnnnnnnnnnnnnnnnnnnnnnnnnnnnnnnnnnnnnnnnnnnnnnnnnnnnnnnnnnnnnnnnnnnnnnnnnnnnnnnnnnnnnnnnnnnnnnnnnnnnnnnnnnnnnnnnnnnnnnnnnnnnnnnnnnnnnnnnnnnnnnnnnnnnnnnnnnnnnnnnnnnnnnnnnnnnnnnnnnnnnnnnnnnnnnnnnnnnnnnnnnnnnnnnnnnnnnnnnnnnnnnnnnnnnnnnnnnnnnnnnnnnnnnnnnnnnnnnnnnnnnnnnnnnnnnnnnnnnnnnnnnnnnnnnnnnnnnnnnnnnnnnnnnnnnnnnnnnnnnnnnnnnnnnnnnnnnnnnnnnnnnnnnnnnnnnnnnnnnnnnnnnnnnnnnnnnnnnnnnnnnnnnnnnnnnnnnnnnnnnnnnnnnnnnnnnnnnnnnnnnnnnnnnnnnnnnnnnnnnnnnnnnnnnnnnnnnnnnnnnnnnnnnnnnnnnnnnnnnnnnnnnnnnnnnnnnnnnnnnnnnnnnnnnnnnnnnnnnnnnnnnnnnnnnnnnnnnnnnnnnnnnnnnnnnnnnnnnnnnnnnnnnnnnnnnnnnnnnnnnnnnnnnnnnnnnnnnnnnnnnnnnnnnnnnnnnnnnnnnnnnnnnnnnnnnnnnnnnnnnnnnnnnnnnnnnnnnnnnnnnnnnnnnnnnnnnnnnnnnnnnnnnnnnnnnnnnnnnnnnnnnnnnnnnnnnnnnnnnnnnnnnnnnnnnnnnnnnnnnnnnnnnnnnnnnnnnnnnnnnnnnnnnnnnnnnnnnnnnnnnnnnnnnnnnnnnnnnnnnnnnnnnnnnnnnnnnnnnnnnnnnnnnnnnnnnnnnnnnnnnnnnnnnnnnnnnnnnnnnnnnnnnnnnnnnnnnnnnnnnnnnnnnnnnnnnnnnnnnnnnnnnnnnnnnnnnnnnnnnnnnnnnnnnnnnnnnnnnnnnnnnnnnnnnnnnnnnnnnnnnnnnnnnnnnnnnnnnnnnnnnnnnnnnnnnnnnnnnnnnnnnnnnnnnnnnnnnnnnnnnnnnnnnnnnnnnnnnnnnnnnnnnnnnnnnnnnnnnnnnnnnnnnnnnnnnnnnnnnnnnnnnnnnnnnnnnnnnnnnnnnnnnnnnnnnnnnnnnnnnnnnnnnnnnnnnnnnnnnnnnnnnnnnnnnnnnnnnnnnnnnnnnnnnnnnnnnnnnnnnnnnnnnnnnnnnnnnnnnnnnnnnnnnnnnnnnnnnnnnnnnnnnnnnnnnnnnnnnnnnnnnnnnnnnnnnnnnnnnnnnnnnnnnnnnnnnnnnnnnnnnnnnnnnnnnnnnnnnnnnnnnnnnnnnnnnnnnnnnnnnnnnnnnnnnnnnnnnnnnnnnnnnnnnnnnnnnnnnnnnnnnnnnnnnnnnnnnnnnnnnnnnnnnnnnnnnnnnnnnnnnnnnnnnnnnnnnnnnnnnnnnnnnnnnnnnnnnnnnnnnnnnnnnnnnnnnnnnnnnnnnnnnnnnnnnnnnnnnnnnnnnnnnnnnnnnnnnnnnnnnnnnnnnnnnnnnnnnnnnnnnnnnnnnnnnnnnnnnnnnnnnnnnnnnnnnnnnnnnnnnnnnnnnnnnnnnnnnnnnnnnnnnnnnnnnnnnnnnnnnnnnnnnnnnnnnnnnnnnnnnnnnnnnnnnnnnnnnnnnnnnnnnnnnnnnnnnnnnnnnnnnnnnnnnnnnnnnnnnnnnnnnnnnnnnnnnnnnnnnnnnnnnnnnnnnnnnnnnnnnnnnnnnnnnnnnnnnnnnnnnnnnnnnnnnnnnnnnnnnnnnnnnnnnnnnnnnnnnnnnnnnnnnnnnnnnnnnnnnnnnnnnnnnnnnnnnnnnnnnnnnnnnnnnnnnnnnnnnnnnnnnnnnnnnnnnnnnnnnnnnnnnnnnnnnnnnnnnnnnnnnnnnnnnnnnnnnnnnnnnnnnnnnnnnnnnnnnnnnnnnnnnnnnnnnnnnnnnnnnnnnnnnnnnnnnnnnnnnnnnnnnnnnnnnnnnnnnnnnnnnnnnnnnnnnnnnnnnnnnnnnnnnnnnnnnnnnnnnnnnnnnnnnnnnnnnnnnnnnnnnnnnnnnnnnnnnnnnnnnnnnnnnnnnnnnnnnnnnnnnnnnnnnnnnnnnnnnnnnnnnnnnnnnnnnnnnnnnnnnnnnnnnnnnnnnnnnnnnnnnnnnnnnnnnnnnnnnnnnnnnnnnnnnnnnnnnnnnnnnnnnnnnnnnnnnnnnnnnnnnnnnnnnnnnnnnnnnnnnnnnnnnnnnnnnnnnnnnnnnnnnnnnnnnnnnnnnnnnnnnnnnnnnnnnnnnnnnnnnnnnnnnnnnnnnnnnnnnnnnnnnnnnnnnnnnnnnnnnnnnnnnnnnnnnnnnnnnnnnnnnnnnnnnnnnnnnnnnnnnnnnnnnnnnnnnnnnnnnnnnnnnnnnnnnnnnnnnnnnnnnnnnnnnnnnnnnnnnnnnnnnnnnnnnnnnnnnnnnnnnnnnnnnnnnnnnnnnnnnnnnnnnnnnnnnnnnnnnnnnnnnnnnnnnnnnnnnnnnnnnnnnnnnnnnnnnnnnnnnnnnnnnnnnnnnnnnnnnnnnnnnnnnnnnnnnnnnnnnnnnnnnnnnnnnnnnnnnnnnnnnnnnnnnnnnnnnnnnnnnnnnnnnnnnnnnnnnnnnnnnnnnnnnnnnnnnnnnnnnnnnnnnnnnnnnnnnnnnnnnnnnnnnnnnnnnnnnnnnnnnnnnnnnnnnnnnnnnnnnnnnnnnnnnnnnnnnnnnnnnnnnnnnnnnnnnnnnnnnnnnnnnnnnnnnnnnnnnnnnnnnnnnnnnnnnnnnnnnnnnnnnnnnnnnnnnnnnnnnnnnnnnnnnnnnnnnnnnnnnnnnnnnnnnnnnnnnnnnnnnnnnnnnnnnnnnnnnnnnnnnnnnnnnnnnnnnnnnnnnnnnnnnnnnnnnnnnnnnnnnnnnnnnnnnnnnnnnnnnnnnnnnnnnnnnnnnnnnnnnnnnnnnnnnnnnnnnnnnnnnnnnnnnnnnnnnnnnnnnnnnnnnnnnnnnnnnnnnnnnnnnnnnnnnnnnnnnnnnnnnnnnnnnnnnnnnnnnnnnnnnnnnnnnnnnnnnnnnnnnnnnnnnnnnnnnnnnnnnnnnnnnnnnnnnnnnnnnnnnnnnnnnnnnnnnnnnnnnnnnnnnnnnnnnnnnnnnnnnnnnnnnnnnnnnnnnnnnnnnnnnnnnnnnnnnnnnnnnnnnnnnnnnnnnnnnnnnnnnnnnnnnnnnnnnnnnnnnnnnnnnnnnnnnnnnnnnnnnnnnnnnnnnnnnnnnnnnnnnnnnnnnnnnnnnnnnnnnnnnnnnnnnnnnnnnnnnnnnnnnnnnnnnnnnnnnnnnnnnnnnnnnnnnnnnnnnnnnnnnnnnnnnnnnnnnnnnnnnnnnnnnnnnnnnnnnnnnnnnnnnnnnnnnnnnnnnnnnnnnnnnnnnnnnnnnnnnnnnnnnnnnnnnnnnnnnnnnnnnnnnnnnnnnnnnnnnnnnnnnnnnnnnnnnnnnnnnnnnnnnnnnnnnnnnnnnnnnnnnnnnnnnnnnnnnnnnnnnnnnnnnnnnnnnnnnnnnnnnnnnnnnnnnnnnnnnnnnnnnnnnnnnnnnnnnnnnnnnnnnnnnnnnnnnnnnnnnnnnnnnnnnnnnnnnnnnnnnnnnnnnnnnnnnnnnnnnnnnnnnnnnnnnnnnnnnnnnnnnnnnnnnnnnnnnnnnnnnnnnnnnnnnnnnnnnnnnnnnnnnnnnnnnnnnnnnnnnnnnnnnnnnnnnnnnnnnnnnnnnnnnnnnnnnnnnnnnnnnnnnnnnnnnnnnnnnnnnnnnnnnnnnnnnnnnnnnnnnnnnnnnnnnnnnnnnnnnnnnnnnnnnnnnnnnnnnnnnnnnnnnnnnnnnnnnnnnnnnnnnnnnnnnnnnnnnnnnnnnnnnnnnnnnnnnnnnnnnnnnnnnnnnnnnnnnnnnnnnnnnnnnnnnnnnnnnnnnnnnnnnnnnnnnnnnnnnnnnnnnnnnnnnnnnnnnnnnnnnnnnnnnnnnnnnnnnnnnnnnnnnnnnnnnnnnnnnnnnnnnnnnnnnnnnnnnnnnnnnnnnnnnnnnnnnnnnnnnnnnnnnnnnnnnnnnnnnnnnnnnnnnnnnnnnnnnnnnnnnnnnnnnnnnnnnnnnnnnnnnnnnnnnnnnnnnnnnnnnnnnnnnnnnnnnnnnnnnnnnnnnnnnnnnnnnnnnnnnnnnnnnnnnnnnnnnnnnnnnnnnnnnnnnnnnnnnnnnnnnnnnnnnnnnnnnnnnnnnnnnnnnnnnnnnnnnnnnnnnnnnnnnnnnnnnnnnnnnnnnnnnnnnnnnnnnnnnnnnnnnnnnnnnnnnnnnnnnnnnnnnnnnnnnnnnnnnnnnnnnnnnnnnnnnnnnnnnnnnnnnnnnnnnnnnnnnnnnnnnnnnnnnnnnnnnnnnnnnnnnnnnnnnnnnnnnnnnnnnnnnnnnnnnnnnnnnnnnnnnnnnnnnnnnnnnnnnnnnnnnnnnnnnnnnnnnnnnnnnnnnnnnnnnnnnnnnnnnnnnnnnnnnnnnnnnnnnnnnnnnnnnnnnnnnnnnnnnnnnnnnnnnnnnnnnnnnnnnnnnnnnnnnnnnnnnnnnnnnnnnnnnnnnnnnnnnnnnnnnnnnnnnnnnnnnnnnnnnnnnnnnnnnnnnnnnnnnnnnnnnnnnnnnnnnnnnnnnnnnnnnnnnnnnnnnnnnnnnnnnnnnnnnnnnnnnnnnnnnnnnnnnnnnnnnnnnnnnnnnnnnnnnnnnnnnnnnnnnnnnnnnnnnnnnnnnnnnnnnnnnnnnnnnnnnnnnnnnnnnnnnnnnnnnnnnnnnnnnnnnnnnnnnnnnnnnnnnnnnnnnnnnnnnnnnnnnnnnnnnnnnnnnnnnnnnnnnnnnnnnnnnnnnnnnnnnnnnnnnnnnnnnnnnnnnnnnnnnnnnnnnnnnnnnnnnnnnnnnnnnnnnnnnnnnnnnnnnnnnnnnnnnnnnnnnnnnnnnnnnnnnnnnnnnnnnnnnnnnnnnnnnnnnnnnnnnnnnnnnnnnnnnnnnnnnnnnnnnnnnnnnnnnnnnnnnnnnnnnnnnnnnnnnnnnnnnnnnnnnnnnnnnnnnnnnnnnnnnnnnnnnnnnnnnnnnnnnnnnnnnnnnnnnnnnnnnnnnnnnnnnnnnnnnnnnnnnnnnnnnnnnnnnnnnnnnnnnnnnnnnnnnnnnnnnnnnnnnnnnnnnnnnnnnnnnnnnnnnnnnnnnnnnnnnnnnnnnnnnnnnnnnnnnnnnnnnnnnnnnnnnnnnnnnnnnnnnnnnnnnnnnnnnnnnnnnnnnnnnnnnnnnnnnnnnnnnnnnnnnnnnnnnnnnnnnnnnnnnnnnnnnnnnnnnnnnnnnnnnnnnnnnnnnnnnnnnnnnnnnnnnnnnnnnnnnnnnnnnnnnnnnnnnnnnnnnnnnnnnnnnnnnnnnnnnnnnnnnnnnnnnnnnnnnnnnnnnnnnnnnnnnnnnnnnnnnnnnnnnnnnnnnnnnnnnnnnnnnnnnnnnnnnnnnnnnnnnnnnnnnnnnnnnnnnnnnnnnnnnnnnnnnnnnnnnnnnnnnnnnnnnnnnnnnnnnnnnnnnnnnnnnnnnnnnnnnnnnnnnnnnnnnnnnnnnnnnnnnnnnnnnnnnnnnnnnnnnnnnnnnnnnnnnnnnnnnnnnnnnnnnnnnnnnnnnnnnnnnnnnnnnnnnnnnnnnnnnnnnnnnnnnnnnnnnnnnnnnnnnnnnnnnnnnnnnnnnnnnnnnnnnnnnnnnnnnnnnnnnnnnnnnnnnnnnnnnnnnnnnnnnnnnnnnnnnnnnnnnnnnnnnnnnnnnnnnnnnnnnnnnnnnnnnnnnnnnnnnnnnnnnnnnnnnnnnnnnnnnnnnnnnnnnnnnnnnnnnnnnnnnnnnnnnnnnnnnnnnnnnnnnnnnnnnnnnnnnnnnnnnnnnnnnnnnnnnnnnnnnnnnnnnnnnnnnnnnnnnnnnnnnnnnnnnnnnnnnnnnnnnnnnnnnnnnnnnnnnnnnnnnnnnnnnnnnnnnnnnnnnnnnnnnnnnnnnnnnnnnnnnnnnnnnnnnnnnnnnnnnnnnnnnnnnnnnnnnnnnnnnnnnnnnnnnnnnnnnnnnnnnnnnnnnnnnnnnnnnnnnnnnnnnnnnnnnnnnnnnnnnnnnnnnnnnnnnnnnnnnnnnnnnnnnnnnnnnnnnnnnnnnnnnnnnnnnnnnnnnnnnnnnnnnnnnnnnnnnnnnnnnnnnnnnnnnnnnnnnnnnnnnnnnnnnnnnnnnnnnnnnnnnnnnnnnnnnnnnnnnnnnnnnnnnnnnnnnnnnnnnnnnnnnnnnnnnnnnnnnnnnnnnnnnnnnnnnnnnnnnnnnnnnnnnnnnnnnnnnnnnnnnnnnnnnnnnnnnnnnnnnnnnnnnnnnnnnnnnnnnnnnnnnnnnnnnnnnnnnnnnnnnnnnnnnnnnnnnnnnnnnnnnnnnnnnnnnnnnnnnnnnnnnnnnnnnnnnnnnnnnnnnnnnnnnnnnnnnnnnnnnnnnnnnnnnnnnnnnnnnnnnnnnnnnnnnnnnnnnnnnnnnnnnnnnnnnnnnnnnnnnnnnnnnnnnnnnnnnnnnnnnnnnnnnnnnnnnnnnnnnnnnnnnnnnnnnnnnnnnnnnnnnnnnnnnnnnnnnnnnnnnnnnnnnnnnnnnnnnnnnnnnnnnnnnnnnnnnnnnnnnnnnnnnnnnnnnnnnnnnnnnnnnnnnnnnnnnnnnnnnnnnnnnnnnnnnnnnnnnnnnnnnnnnnnnnnnnnnnnnnnnnnnnnnnnnnnnnnnnnnnnnnnnnnnnnnnnnnnnnnnnnnnnnnnnnnnnnnnnnnnnnnnnnnnnnnnnnnnnnnnnnnnnnnnnnnnnnnnnnnnnnnnnnnnnnnnnnnnnnnnnnnnnnnnnnnnnnnnnnnnnnnnnnnnnnnnnnnnnnnnnnnnnnnnnnnnnnnnnnnnnnnnnnnnnnnnnnnnnnnnnnnnnnnnnnnnnnnnnnnnnnnnnnnnnnnnnnnnnnnnnnnnnnnnnnnnnnnnnnnnnnnnnnnnnnnnnnnnnnnnnnnnnnnnnnnnnnnnnnnnnnnnnnnnnnnnnnnnnnnnnnnnnnnnnnnnnnnnnnnnnnnnnnnnnnnnnnnnnnnnnnnnnnnnnnnnnnnnnnnnnnnnnnnnnnnnnnnnnnnnnnnnnnnnnnnnnnnnnnnnnnnnnnnnnnnnnnnnnnnnnnnnnnnnnnnnnnnnnnnnnnnnnnnnnnnnnnnnnnnnnnnnnnnnnnnnnnnnnnnnnnnnnnnnnnnnnnnnnnnnnnnnnnnnnnnnnnnnnnnnnnnnnnnnnnnnnnnnnnnnnnnnnnnnnnnnnnnnnnnnnnnnnnnnnnnnnnnnnnnnnnnnnnnnnnnnnnnnnnnnnnnnnnnnnnnnnnnnnnnnnnnnnnnnnnnnnnnnnnnnnnnnnnnnnnnnnnnnnnnnnnnnnnnnnnnnnnnnnnnnnnnnnnnnnnnnnnnnnnnnnnnnnnnnnnnnnnnnnnnnnnnnnnnnnnnnnnnnnnnnnnnnnnnnnnnnnnnnnnnnnnnnnnnnnnnnnnnnnnnnnnnnnnnnnnnnnnnnnnnnnnnnnnnnnnnnnnnnnnnnnnnnnnnnnnnnnnnnnnnnnnnnnnnnnnnnnnnnnnnnnnnnnnnnnnnnnnnnnnnnnnnnnnnnnnnnnnnnnnnnnnnnnnnnnnnnnnnnnnnnnnnnnnnnnnnnnnnnnnnnnnnnnnnnnnnnnnnnnnnnnnnnnnnnnnnnnnnnnnnnnnnnnnnnnnnnnnnnnnnnnnnnnnnnnnnnnnnnnnnnnnnnnnnnnnnnnnnnnnnnnnnnnnnnnnnnnnnnnnnnnnnnnnnnnnnnnnnnnnnnnnnnnnnnnnnnnnnnnnnnnnnnnnnnnnnnnnnnnnnnnnnnnnnnnnnnnnnnnnnnnnnnnnnnnnnnnnnnnnnnnnnnnnnnnnnnnnnnnnnnnnnnnnnnnnnnnnnnnnnnnnnnnnnnnnnnnnnnnnnnnnnnnnnnnnnnnnnnnnnnnnnnnnnnnnnnnnnnnnnnnnnnnnnnnnnnnnnnnnnnnnnnnnnnnnnnnnnnnnnnnnnnnnnnnnnnnnnnnnnnnnnnnnnnnnnnnnnnnnnnnnnnnnnnnnnnnnnnnnnnnnnnnnnnnnnnnnnnnnnnnnnnnnnnnnnnnnnnnnnnnnnnnnnnnnnnnnnnnnnnnnnnnnnnnnnnnnnnnnnnnnnnnnnnnnnnnnnnnnnnnnnnnnnnnnnnnnnnnnnnnnnnnnnnnnnnnnnnnnnnnnnnnnnnnnnnnnnnnnnnnnnnnnnnnnnnnnnnnnnnnnnnnnnnnnnnnnnnnnnnnnnnnnnnnnnnnnnnnnnnnnnnnnnnnnnnnnnnnnnnnnnnnnnnnnnnnnnnnnnnnnnnnnnnnnnnnnnnnnnnnnnnnnnnnnnnnnnnnnnnnnnnnnnnnnnnnnnnnnnnnnnnnnnnnnnnnnnnnnnnnnnnnnnnnnnnnnnnnnnnnnnnnnnnnnnnnnnnnnnnnnnnnnnnnnnnnnnnnnnnnnnnnnnnnnnnnnnnnnnnnnnnnnnnnnnnnnnnnnnnnnnnnnnnnnnnnnnnnnnnnnnnnnnnnnnnnnnnnnnnnnnnnnnnnnnnnnnnnnnnnnnnnnnnnnnnnnnnnnnnnnnnnnnnnnnnnnnnnnnnnnnnnnnnnnnnnnnnnnnnnnnnnnnnnnnnnnnnnnnnnnnnnnnnnnnnnnnnnnnnnnnnnnnnnnnnnnnnnnnnnnnnnnnnnnnnnnnnnnnnnnnnnnnnnnnnnnnnnnnnnnnnnnnnnnnnnnnnnnnnnnnnnnnnnnnnnnnnnnnnnnnnnnnnnnnnnnnnnnnnnnnnnnnnnnnnnnnnnnnnnnnnnnnnnnnnnnnnnnnnnnnnnnnnnnnnnnnnnnnnnnnnnnnnnnnnnnnnnnnnnnnnnnnnnnnnnnnnnnnnnnnnnnnnnnnnnnnnnnnnnnnnnnnnnnnnnnnnnnnnnnnnnnnnnnnnnnnnnnnnnnnnnnnnnnnnnnnnnnnnnnnnnnnnnnnnnnnnnnnnnnnnnnnnnnnnnnnnnnnnnnnnnnnnnnnnnnnnnnnnnnnnnnnnnnnnnnnnnnnnnnnnnnnnnnnnnnnnnnnnnnnnnnnnnnnnnnnnnnnnnnnnnnnnnnnnnnnnnnnnnnnnnnnnnnnnnnnnnnnnnnnnnnnnnnnnnnnnnnnnnnnnnnnnnnnnnnnnnnnnnnnnnnnnnnnnnnnnnnnnnnnnnnnnnnnnnnnnnnnnnnnnnnnnnnnnnnnnnnnnnnnnnnnnnnnnnnnnnnnnnnnnnnnnnnnnnnnnnnnnnnnnnnnnnnnnnnnnnnnnnnnnnnnnnnnnnnnnnnnnnnnnnnnnnnnnnnnnnnnnnnnnnnnnnnnnnnnnnnnnnnnnnnnnnnnnnnnnnnnnnnnnnnnnnnnnnnnnnnnnnnnnnnnnnnnnnnnnnnnnnnnnnnnnnnnnnnnnnnnnnnnnnnnnnnnnnnnnnnnnnnnnnnnnnnnnnnnnnnnnnnnnnnnnnnnnnnnnnnnnnnnnnnnnnnnnnnnnnnnnnnnnnnnnnnnnnnnnnnnnnnnnnnnnnnnnnnnnnnnnnnnnnnnnnnnnnnnnnnnnnnnnnnnnnnnnnnnnnnnnnnnnnnnnnnnnnnnnnnnnnnnnnnnnnnnnnnnnnnnnnnnnnnnnnnnnnnnnnnnnnnnnnnnnnnnnnnnnnnnnnnnnnnnnnnnnnnnnnnnnnnnnnnnnnnnnnnnnnnnnnnnnnnnnnnnnnnnnnnnnnnnnnnnnnnnnnnnnnnnnnnnnnnnnnnnnnnnnnnnnnnnnnnnnnnnnnnnnnnnnnnnnnnnnnnnnnnnnnnnnnnnnnnnnnnnnnnnnnnnnnnnnnnnnnnnnnnnnnnnnnnnnnnnnnnnnnnnnnnnnnnnnnnnnnnnnnnnnnnnnnnnnnnnnnnnnnnnnnnnnnnnnnnnnnnnnnnnnnnnnnnnnnnnnnnnnnnnnnnnnnnnnnnnnnnnnnnnnnnnnnnnnnnnnnnnnnnnnnnnnnnnnnnnnnnnnnnnnnnnnnnnnnnnnnnnnnnnnnnnnnnnnnnnnnnnnnnnnnnnnnnnnnnnnnnnnnnnnnnnnnnnnnnnnnnnnnnnnnnnnnnnnnnnnnnnnnnnnnnnnnnnnnnnnnnnnnnnnnnnnnnnnnnnnnnnnnnnnnnnnnnnnnnnnnnnnnnnnnnnnnnnnnnnnnnnnnnnnnnnnnnnnnnnnnnnnnnnnnnnnnnnnnnnnnnnnnnnnnnnnnnnnnnnnnnnnnnnnnnnnnnnnnnnnnnnnnnnnnnnnnnnnnnnnnnnnnnnnnnnnnnnnnnnnnnnnnnnnnnnnnnnnnnnnnnnnnnnnnnnnnnnnnnnnnnnnnnnnnnnnnnnnnnnnnnnnnnnnnnnnnnnnnnnnnnnnnnnnnnnnnnnnnnnnnnnnnnnnnnnnnnnnnnnnnnnnnnnnnnnnnnnnnnnnnnnnnnnnnnnnnnnnnnnnnnnnnnnnnnnnnnnnnnnnnnnnnnnnnnnnnnnnnnnnnnnnnnnnnnnnnnnnnnnnnnnnnnnnnnnnnnnnnnnnnnnnnnnnnnnnnnnnnnnnnnnnnnnnnnnnnnnnnnnnnnnnnnnnnnnnnnnnnnnnnnnnnnnnnnnnnnnnnnnnnnnnnnnnnnnnnnnnnnnnnnnnnnnnnnnnnnnnnnnnnnnnnnnnnnnnnnnnnnnnnnnnnnnnnnnnnnnnnnnnnnnnnnnnnnnnnnnnnnnnnnnnnnnnnnnnnnnnnnnnnnnnnnnnnnnnnnnnnnnnnnnnnnnnnnnnnnnnnnnnnnnnnnnnnnnnnnnnnnnnnnnnnnnnnnnnnnnnnnnnnnnnnnnnnnnnnnnnnnnnnnnnnnnnnnnnnnnnnnnnnnnnnnnnnnnnnnnnnnnnnnnnnnnnnnnnnnnnnnnnnnnnnnnnnnnnnnnnnnnnnnnnnnnnnnnnnnnnnnnnnnnnnnnnnnnnnnnnnnnnnnnnnnnnnnnnnnnnnnnnnnnnnnnnnnnnnnnnnnnnnnnnnnnnnnnnnnnnnnnnnnnnnnnnnnnnnnnnnnnnnnnnnnnnnnnnnnnnnnnnnnnnnnnnnnnnnnnnnnnnnnnnnnnnnnnnnnnnnnnnnnnnnnnnnnnnnnnnnnnnnnnnnnnnnnnnnnnnnnnnnnnnnnnnnnnnnnnnnnnnnnnnnnnnnnnnnnnnnnnnnnnnnnnnnnnnnnnnnnnnnnnnnnnnnnnnnnnnnnnnnnnnnnnnnnnnnnnnnnnnnnnnnnnnnnnnnnnnnnnnnnnnnnnnnnnnnnnnnnnnnnnnnnnnnnnnnnnnnnnnnnnnnnnnnnnnnnnnnnnnnnnnnnnnnnnnnnnnnnnnnnnnnnnnnnnnnnnnnnnnnnnnnnnnnnnnnnnnnnnnnnnnnnnnnnnnnnnnnnnnnnnnnnnnnnnnnnnnnnnnnnnnnnnnnnnnnnnnnnnnnnnnnnnnnnnnnnnnnnnnnnnnnnnnnnnnnnnnnnnnnnnnnnnnnnnnnnnnnnnnnnnnnnnnnnnnnnnnnnnnnnnnnnnnnnnnnnnnnnnnnnnnnnnnnnnnnnnnnnnnnnnnnnnnnnnnnnnnnnnnnnnnnnnnnnnnnnnnnnnnnnnnnnnnnnnnnnnnnnnnnnnnnnnnnnnnnnnnnnnnnnnnnnnnnnnnnnnnnnnnnnnnnnnnnnnnnnnnnnnnnnnnnnnnnnnnnnnnnnnnnnnnnnnnnnnnnnnnnnnnnnnnnnnnnnnnnnnnnnnnnnnnnnnnnnnnnnnnnnnnnnnnnnnnnnnnnnnnnnnnnnnnnnnnnnnnnnnnnnnnnnnnnnnnnnnnnnnnnnnnnnnnnnnnnnnnnnnnnnnnnnnnnnnnnnnnnnnnnnnnnnnnnnnnnnnnnnnnnnnnnnnnnnnnnnnnnnnnnnnnnnnnnnnnnnnnnnnnnnnnnnnnnnnnnnnnnnnnnnnnnnnnnnnnnnnnnnnnnnnnnnnnnnnnnnnnnnnnnnnnnnnnnnnnnnnnnnnnnnnnnnnnnnnnnnnnnnnnnnnnnnnnnnnnnnnnnnnnnnnnnnnnnnnnnnnnnnnnnnnnnnnnnnnnnnnnnnnnnnnnnnnnnnnnnnnnnnnnnnnnnnnnnnnnnnnnnnnnnnnnnnnnnnnnnnnnnnnnnnnnnnnnnnnnnnnnnnnnnnnnnnnnnnnnnnnnnnnnnnnnnnnnnnnnnnnnnnnnnnnnnnnnnnnnnnnnnnnnnnnnnnnnnnnnnnnnnnnnnnnnnnnnnnnnnnnnnnnnnnnnnnnnnnnnnnnnnnnnnnnnnnnnnnnnnnnnnnnnnnnnnnnnnnnnnnnnnnnnnnnnnnnnnnnnnnnnnnnnnnnnnnnnnnnnnnnnnnnnnnnnnnnnnnnnnnnnnnnnnnnnnnnnnnnnnnnnnnnnnnnnnnnnnnnnnnnnnnnnnnnnnnnnnnnnnnnnnnnnnnnnnnnnnnnnnnnnnnnnnnnnnnnnnnnnnnnnnnnnnnnnnnnnnnnnnnnnnnnnnnnnnnnnnnnnnnnnnnnnnnnnnnnnnnnnnnnnnnnnnnnnnnnnnnnnnnnnnnnnnnnnnnnnnnnnnnnnnnnnnnnnnnnnnnnnnnnnnnnnnnnnnnnnnnnnnnnnnnnnnnnnnnnnnnnnnnnnnnnnnnnnnnnnnnnnnnnnnnnnnnnnnnnnnnnnnnnnnnnnnnnnnnnnnnnnnnnnnnnnnnnnnnnnnnnnnnnnnnnnnnnnnnnnnnnnnnnnnnnnnnnnnnnnnnnnnnnnnnnnnnnnnnnnnnnnnnnnnnnnnnnnnnnnnnnnnnnnnnnnnnnnnnnnnnnnnnnnnnnnnnnnnnnnnnnnnnnnnnnnnnnnnnnnnnnnnnnnnnnnnnnnnnnnnnnnnnnnnnnnnnnnnnnnnnnnnnnnnnnnnnnnnnnnnnnnnnnnnnnnnnnnnnnnnnnnnnnnnnnnnnnnnnnnnnnnnnnnnnnnnnnnnnnnnnnnnnnnnnnnnnnnnnnnnnnnnnnnnnnnnnnnnnnnnnnnnnnnnnnnnnnnnnnnnnnnnnnnnnnnnnnnnnnnnnnnnnnnnnnnnnnnnnnnnnnnnnnnnnnnnnnnnnnnnnnnnnnnnnnnnnnnnnnnnnnnnnnnnnnnnnnnnnnnnnnnnnnnnnnnnnnnnnnnnnnnnnnnnnnnnnnnnnnnnnnnnnnnnnnnnnnnnnnnnnnnnnnnnnnnnnnnnnnnnnnnnnnnnnnnnnnnnnnnnnnnnnnnnnnnnnnnnnnnnnnnnnnnnnnnnnnnnnnnnnnnnnnnnnnnnnnnnnnnnnnnnnnnnnnnnnnnnnnnnnnnnnnnnnnnnnnnnnnnnnnnnnnnnnnnnnnnnnnnnnnnnnnnnnnnnnnnnnnnnnnnnnnnnnnnnnnnnnnnnnnnnnnnnnnnnnnnnnnnnnnnnnnnnnnnnnnnnnnnnnnnnnnnnnnnnnnnnnnnnnnnnnnnnnnnnnnnnnnnnnnnnnnnnnnnnnnnnnnnnnnnnnnnnnnnnnnnnnnnnnnnnnnnnnnnnnnnnnnnnnnnnnnnnnnnnnnnnnnnnnnnnnnnnnnnnnnnnnnnnnnnnnnnnnnnnnnnnnnnnnnnnnnnnnnnnnnnnnnnnnnnnnnnnnnnnnnnnnnnnnnnnnnnnnnnnnnnnnnnnnnnnnnnnnnnnnnnnnnnnnnnnnnnnnnnnnnnnnnnnnnnnnnnnnnnnnnnnnnnnnnnnnnnnnnnnnnnnnnnnnnnnnnnnnnnnnnnnnnnnnnnnnnnnnnnnnnnnnnnnnnnnnnnnnnnnnnnnnnnnnnnnnnnnnnnnnnnnnnnnnnnnnnnnnnnnnnnnnnnnnnnnnnnnnnnnnnnnnnnnnnnnnnnnnnnnnnnnnnnnnnnnnnnnnnnnnnnnnnnnnnnnnnnnnnnnnnnnnnnnnnnnnnnnnnnnnnnnnnnnnnnnnnnnnnnnnnnnnnnnnnnnnnnnnnnnnnnnnnnnnnnnnnnnnnnnnnnnnnnnnnnnnnnnnnnnnnnnnnnnnnnnnnnnnnnnnnnnnnnnnnnnnnnnnnnnnnnnnnnnnnnnnnnnnnnnnnnnnnnnnnnnnnnnnnnnnnnnnnnnnnnnnnnnnnnnnnnnnnnnnnnnnnnnnnnnnnnnnnnnnnnnnnnnnnnnnnnnnnnnnnnnnnnnnnnnnnnnnnnnnnnnnnnnnnnnnnnnnnnnnnnnnnnnnnnnnnnnnnnnnnnnnnnnnnnnnnnnnnnnnnnnnnnnnnnnnnnnnnnnnnnnnnnnnnnnnnnnnnnnnnnnnnnnnnnnnnnnnnnnnnnnnnnnnnnnnnnnnnnnnnnnnnnnnnnnnnnnnnnnnnnnnnnnnnnnnnnnnnnnnnnnnnnnnnnnnnnnnnnnnnnnnnnnnnnnnnnnnnnnnnnnnnnnnnnnnnnnnnnnnnnnnnnnnnnnnnnnnnnnnnnnnnnnnnnnnnnnnnnnnnnnnnnnnnnnnnnnnnnnnnnnnnnnnnnnnnnnnnnnnnnnnnnnnnnnnnnnnnnnnnnnnnnnnnnnnnnnnnnnnnnnnnnnnnnnnnnnnnnnnnnnnnnnnnnnnnnnnnnnnnnnnnnnnnnnnnnnnnnnnnnnnnnnnnnnnnnnnnnnnnnnnnnnnnnnnnnnnnnnnnnnnnnnnnnnnnnnnnnnnnnnnnnnnnnnnnnnnnnnnnnnnnnnnnnnnnnnnnnnnnnnnnnnnnnnnnnnnnnnnnnnnnnnnnnnnnnnnnnnnnnnnnnnnnnnnnnnnnnnnnnnnnnnnnnnnnnnnnnnnnnnnnnnnnnnnnnnnnnnnnnnnnnnnnnnnnnnnnnnnnnnnnnnnnnnnnnnnnnnnnnnnnnnnnnnnnnnnnnnnnnnnnnnnnnnnnnnnnnnnnnnnnnnnnnnnnnnnnnnnnnnnnnnnnnnnnnnnnnnnnnnnnnnnnnnnnnnnnnnnnnnnnnnnnnnnnnnnnnnnnnnnnnnnnnnnnnnnnnnnnnnnnnnnnnnnnnnnnnnnnnnnnnnnnnnnnnnnnnnnnnnnnnnnnnnnnnnnnnnnnnnnnnnnnnnnnnnnnnnnnnnnnnnnnnnnnnnnnnnnnnnnnnnnnnnnnnnnnnnnnnnnnnnnnnnnnnnnnnnnnnnnnnnnnnnnnnnnnnnnnnnnnnnnnnnnnnnnnnnnnnnnnnnnnnnnnnnnnnnnnnnnnnnnnnnnnnnnnnnnnnnnnnnnnnnnnnnnnnnnnnnnnnnnnnnnnnnnnnnnnnnnnnnnnnnnnnnnnnnnnnnnnnnnnnnnnnnnnnnnnnnnnnnnnnnnnnnnnnnnnnnnnnnnnnnnnnnnnnnnnnnnnnnnnnnnnnnnnnnnnnnnnnnnnnnnnnnnnnnnnnnnnnnnnnnnnnnnnnnnnnnnnnnnnnnnnnnnnnnnnnnnnnnnnnnnnnnnnnnnnnnnnnnnnnnnnnnnnnnnnnnnnnnnnnnnnnnnnnnnnnnnnnnnnnnnnnnnnnnnnnnnnnnnnnnnnnnnnnnnnnnnnnnnnnnnnnnnnnnnnnnnnnnnnnnnnnnnnnnnnnnnnnnnnnnnnnnnnnnnnnnnnnnnnnnnnnnnnnnnnnnnnnnnnnnnnnnnnnnnnnnnnnnnnnnnnnnnnnnnnnnnnnnnnnnnnnnnnnnnnnnnnnnnnnnnnnnnnnnnnnnnnnnnnnnnnnnnnnnnnnnnnnnnnnnnnnnnnnnnnnnnnnnnnnnnnnnnnnnnnnnnnnnnnnnnnnnnnnnnnnnnnnnnnnnnnnnnnnnnnnnnnnnnnnnnnnnnnnnnnnnnnnnnnnnnnnnnnnnnnnnnnnnnnnnnnnnnnnnnnnnnnnnnnnnnnnnnnnnnnnnnnnnnnnnnnnnnnnnnnnnnnnnnnnnnnnnnnnnnnnnnnnnnnnnnnnnnnnnnnnnnnnnnnnnnnnnnnnnnnnnnnnnnnnnnnnnnnnnnnnnnnnnnnnnnnnnnnnnnnnnnnnnnnnnnnnnnnnnnnnnnnnnnnnnnnnnnnnnnnnnnnnnnnnnnnnnnnnnnnnnnnnnnnnnnnnnnnnnnnnnnnnnnnnnnnnnnnnnnnnnnnnnnnnnnnnnnnnnnnnnnnnnnnnnnnnnnnnnnnnnnnnnnnnnnnnnnnnnnnnnnnnnnnnnnnnnnnnnnnnnnnnnnnnnnnnnnnnnnnnnnnnnnnnnnnnnnnnnnnnnnnnnnnnnnnnnnnnnnnnnnnnnnnnnnnnnnnnnnnnnnnnnnnnnnnnnnnnnnnnnnnnnnnnnnnnnnnnnnnnnnnnnnnnnaatatagcatgcatacacatgagaggagtcaagcagggagttttgctggaaacgtgcaaaaaaaattgctgtgaggaaggggctgttttgtatggtgaggaagagaggtagtgttttcctgcaaggtaagattatttctcctgaaggaatgaccttggcagttgccaggggtcacaattgccgaacaaattggtagcagctagaatcagaagtgctttccttgcttacacaaaataactgtgtgcctagagaggtgaggcagaagcacagagccgcagggaggagagccagccacagagcagccgcagtagcaatccagaggagttctagaagaaccaagagaggaacatcccaaatggcaggcaaacctcagaaagtgcatggcaaagcaaggacaggcatcacacattaagaagagtgttagggaaaagtggggtctctggagtgaaagtatagaacaagttggtaaatgagcaccatacaaaaagaaaatgagctgaaccctctgtaccttttgttcatatagccaaggacagagcaagctcaagggagacgatcattgcttatttctaaacacataggaccagaaaacacattgggcatactgaaaatagatctctctaattcagccaacaatttaacccattgcttctcaaacaatgtgcagagagctcagctgggagcctcttttaatggatacttgggtttcatagatctggggtggggactgagattggatttctgacttccttgtgaccacgtgttttcctgaaagtacctcattgctgctgattcatggtgatcctgtccacaccacactctaaacagccatggccatgacttagcaaaccaaactcgctgtgaaaggaccaaaggagaaccaaaagagggttctaaagaactgagagggttataaaacgacctaaggcaaaaatcccagctctcaagaggtacaattagagaacttttcccagttgacagtcccaagcctggagaagggagatttggtaactaaaattacgcatgcaatttggtaatggggagattctattaaatttttgctcagtacagccctcttaactttttgcttatgtattgttttttacctttgttgagtgtttatgtgtgtagtatgcaggtcacacgcactcctcatttgtcacccagccaagccagcttgcccaaggatctgctgtccctggcttccaagtagtgaggtcacaatcaggctgccacaactttctggcttttatgtgggtgctggagatgcaacccaggtcttcatgcatgtatgacgctctacccactgagctttcctcccaatctgccatcagaactcttcattacaggaacaaaaactatcatccaacaatggctttcttctccacacactctgtcttgtcacataaaaaagaagcacgggcttacagggtctttgtttgtttgtttgtttgtttgtgtttgtttttgttttttatcttgacgtatattgctacagtagtttagtgacataaggtctgattttaaaatagagtagattaattgtgtggcaaaggtgtagaaataggaatgctacagacattgcagacaaactttctgcattaactctttaagttgtccattaaatacctggctctatctttgtacctctgtgaaaggcatcaagtggtctggacttcagaaaaccttggaggatattccagtctcctctatacatctctatcagcgtggctcccaggcaacagaccaaaaaatgatagcaactaaacccatagtagactacagtgagattgtgtgtgttagaacacctcagtaccaaggacaagaagcccacttccatgaagagagatccactatttcaatgtgggcttccactccatggttacctcacaagtaacagtcatttctgacctgtcctttaaggtgcccaccctctctagacaatgaaacttctcttgctatgttatataattatttcctgatgtgtttatgtatacaaactggcataatgcttcccatgggccagcgtcatcatatacacttacatattagaattagaaattcgtgtatgaaaggagttatgaaggctgttttgcactggtcagttttcctgatttggtgcgtccatattagcttttgcctctcagctcatgtctgaggtctaggaattagccttcatggctttcaattgagtctcactttggggctagatccacgatatgctgcttcatagaagaagaatcattagagcgtgtgacagtggtcagtacactcatttattcaccaactgagcaaactagagctgccacttttcctggtatggagagcaggtgaattgccgtcatggccagatgatgaatacactctcaaaagcaaaaattgagagtaaagaaacgaggttaaaggagatgtctaaatgcaatggaaccagaaaattgactacaactggtcaattgcctacacacttcaaagctcagtacagaaagccatttgattgtcatcagaaaagcacaattagaagatgactcacagatacttgccacttatgagatggctgtgctaattttccttaggatccataagctagaacaatcagtagataggagtctctgcagctcaccatacaagctgctgttaaaaatgatagctttaacgacacttgaggtgccactctcaggataaatgtcaaagagaccacaggagagacactggagcatacctttggcatctgtgattgtaaaaaccacaaactatagatctcacactcaaggggagagcttagggcttatcctctccaggatcattttaagtgatgatcactatcaaacctgactctggaccccaccaagttatgaaagtcctccttcttaacagatgaataacagagaagccactgggtggtattttattattttcatattgctgctgtataaattttcacaaagctggttccagagagcacacagatgttctgtcttgctgctctgcagatcagaatccaaaatgagactagactaaagtaggtgcctgtacagctgctttccttctggggactgtagaagagaaccatctggttaccagacctggggtatttgtccttatcttctgacccttcgcctatcattcacatcatttgacctcagctcccccatctctggttctaagccaccctcctcctcctagagaattcttttgattactttagacccacttggataatccagataatcttcctatccaaggacatcagccatgtaagtcaacaaaatcacatgttgtagttccagagattaggatgtgagcatatttggggggctacaccacagaccatattttcattgaagacttaacaaaagaagaagtaaaacagcccacatctgccctggaagaggcaagtagatgggggactaaagagctcaggagaagtcgtccactaggcaaaaagaaacctgattcacccaactacaattttgccaatttgaagcctttacaaactctcacataatctcttattccaagaagctctctctaaattatatccatcatcatcattatgtttttaatcagctaaacaattacagtaatgtctgtgttctgaaaacagggacatgcgagttggctgctctcccaggaacccttctgcatttcttttcacctctgagtctgagtaaaatcatctcccacaagttatgtaaccaaagcagaacaactccaggtagatgcgccctggcaaaagctcccttgggtacaaacaccaaagagaatgtggtagagtggctatccattgcttttgcctgcaaacaagcattgacatgagggggtagtttacaaactatgtaactttggacagaaacactgtagaaaacggaagactgtctcccctgcaatcacagacaggactgtccagtccacttccttaatctctgtatccctcctacccacttattcagcctcctgccatttgtcaagacagtgggatgcagtgtatggtttccccaaaataattggagaagagctgcctggtgtgtggattcagtaggcagatacttaggctcgtcactcagaaattctgatttttttttttccgttttggcagggatcttgttatctacttgaatagatgattcagtgattcttattatcagaccaggatgagcagggctgacaggatgaaacaggatgggcttagaaattggccttggaaattagacacacttgaatacagcttttcaagctggtagaggtgaagaagttgcttagctacactgagcctatacagtcaaaatgtataggttattggagagctgaataagatagtgtatccatttggttgtatccaaacaatctacagtttaatcattaatcattttattttattttattttattttattttattttattggggggggttgttattgttgttattgttgtttttcaagacagggtttctctgactgtcctggaactctgtagaccaggctagcctcgaactcggaaatccacctgcctctgcctccctagtgctgggattaaaggtgtgcaccaccactgcctggctaatcattgtcaatgatcagtggtcaccctcccttttttctcccttccttctcccttccctccttccatccttcacaccatgtcttttcctatgatacctgccatattgggattttcacagcagaagaatgtctactgattctgaaaatgtcatacaataacaaccagaaatacttggttaattcctctgccaggacaggccctttcccatccaccagttgtcaacttcatcatgcaattgcgtagccccttggcactctctctttcacatagcttcctcatacttacaaggaattgttcacaaaggctcctctctcttagagcaccctgctgcacacagaaagctaatatcgtgcagccattgctccaggaagtgtccaggaactggttgcatcttattctggagaaaataaaatagcaagccagttttgctgaccaacaggatgaggttacacatacatttcaggagacgctcctgctgcatggagtccctgtcatcacatttaatgtcttgtatctaccagcatcagagtcaccatggggatcacatgacacatccagtcttgatgtgtattttgcatttgctggaacattaggtatatttcaaagaccacctccatagctagtttgaaatcttaaggctcagctagaattagaaaggcagtctgttcttagtaactacaaagaatcttgggagtatatttgacttgtatgtgttctctctctctctctctctctctctctctctctctctctctctctcttagttaaaactattttattttttatttttatttttttctctatggtaatttttatttttatcatatattttctttatttacatttcaaatattatcccctttcctagtttcccctccaaaaatcccctatccctcccctccccctgctccccaacccactcactcccatttccagtcctggcattttccctatattggggcatggaaccttcacatgacctagggcctctcttcccattgatggccaattaggccatcctcatctaaatatacagctagagccacatgtcccaccatgtgttttctttgattggtggtttagttccaaggagctctgggggtactgattagttcatattgatgttcctcctatgaggctgcaaaccccttcagctccttgggtactttctctagctccttcattggggaccttgtgctccgtcctatggatgattgtgagcatcctcttctgtacttgccaggcactggcagagcccctcaggagatagctatatcaggctcctgtcagctaactcttgttggcatctgccatagtgtctgggcttggtggttgtttatgggatggatctccaagtggggcagtctctggatagtcattccttcaggctctgctccaaactttgtctctgtaactctttccatgggcattttgttccccctttaagaaggattctgagcttctgggataatatctacttatcaatgagtgcataccatgtgtgttattccgtgattgggttacctcactcaagatgatatcctccagatccatccatttgtctaagaatttcataaactcattgtttttaatagctggatagtactccattgtgtaaatgtaccacattttctgtatccattcctctgttgagggacatctgggttctttccagcttctggctattatggtgcaggttcacagagacctaaccactgtgaccctcttctccaattcttgacattataggtaagtgacaatgtgttctccagaccacagagcagttgtaagaagtgcagcctccaggtccatgtgtcagacatactgaaacaaaaattctaggaattaactcagaaataaacagttgaaagcacaccaattggttatccaatatccaatggtcagcccttgaaaacatacatacataacattatacagactgagcatgctgtacttaaagtacttaggaaaaactgtattgtacaaaatacacacatatacatgtaacagttaatgaaaaagaagccatgaattcgaaagaggatgagcaggggggtatatgggaggattttgaggaaggacgaggaaggaggtgatataattctattataagctcaaactcaagagataatctttaagagccttaaatgatcgagacacatattggtttaacattggctgcactacagccatctctgtcttttacccatctcttgagagtaacctcataatatgctgctagcttagattaccactgcccattcaaaggctgcataggagtatccccactatgccaactgcattgtcttcccaagatcatcttggaaaagctcttaaaaaatcacagacactgtagatcacacaggtggataactgaaagaccaatgcagttttctaaaaggcacatgatatgaaaaaataagtggctagtactgcgctgaatattttaagtggtagaaagaacaaatattttaaaattaattattttatttattaacattctaaatgttgccctcatcctggtcctccctccctgagttcttcatcctattattccacccctttgcctctgagagggtgctccctttctcagcatcccccttccctagggcatcaaatctctacagggttaggcacatcctcttccactgaggtcagatagtgcagacttctgctatatatgtgccaggggcctcagaccagcctgtgtatgctgcctggttggtggctcagtctctgggagttcccagcagtccaagtaagttgacactgttggtcttcctatggggttgccatccccttcagtttcttcaatccttcccctaactcttccatagggatccccaacctcagtccaatggttggctgtaagtacctgcatctgtctcagtcagctgctggtagagcctctcagaggacagccatgcttggctcctgtctgcaagcacaacataacatcagtaatagtgtcagagtttggtgcctgtgcgtgggatggatcccaagttgggcctttcctcagtctctgcttttttttttgtccctgcatttcttttagacaggaacaatcctgggtcaaagattttgaaggtggattagtgaccccatttctctactaggaggggccctgtctatgtattggaggtggtcatttccggttccatgtccctactgttgtgcattttggctaagttcatccccattactttctgggatcctttcacatcccagatctctgggcctttctagaggttccatctatcccccaccccaagaagctgcatatttctactcattctcctagctttctgcacttctctcctgtctcaccagatatctgatcttgcccttcccaaccttctcccatcaaggcccctccctctcactgcctcccatgattattttgttccccagtctatgtgggactgaagcatccccacttgggccttccttcttgttaaactttttatggtttctgggttgaatcataggtattctgtactttttggctaatatccaattatctgtgtatatgccatacatgtccttttgggtctgggttaccttactcaagatgatattttctagctacatccatttgtctgcaaaatgcatcatgtcttcctttttaatagctgaatagtatcccattgtgtaaatgaaccacattttctgtatctgctcttcagttgagggacatctgggttgtttcgtttctggctattatgagtaaggctgctaggaatcgagtggagcacatgtccttgtggtaaaggtagagtatcttttgggtatatgcccagtagtagtattgctgggtcttcgggtagaactattttcaattttctgaggaactgccagattgatttccagagtggttgtactagtttgcaatcctaccagcaatggaggagtgttcctctttctctatatcctcatcagcatgtgctgtcacctgagttatggatcttagccattctgattggtgtaaggtagaatctcaggatcattgtgatttgtttttccctgatgactaaggatgttgaacatttctttaggtgcttcttggccatttgtgtttcctcagttgagaactctttgtttagctctgtacccattttttaaattaggttatttggtttttttggagtctaacttctttatatatctatacatatatctatacatatatatatatatatatatatatatatacatacatacacatatacacatacacatatatgtatatatatgatattaatcctatatttgatatagtattagtgaagatcttttcccaatctgtagactgccattttgttctattgacagatgtttttagtttcatgaggtcccatttatcaattgttgagcttagagcctgagcagtagaacagatttttttaattgtcaccacagaaaactcttatgcatatgcatctcccataccctaacttcacttctcaactcatgctggaaaaaggttctatgactcattatttaataccattcctgacaatagtagttccatgggaaatgatacatgtatgtatgaaaacataagtgagtaagtgaatggcttcatggtcatgggcaaatgttggtgtcaaagaaaagccttttgacatgatctgaggcccataccatttatcccagcactgaagaagaggcaggtggatctctgtaagtttgaggccagaccagttttcataatgagttctaggccaaccagggttatatagagaggacttctctttacagaaaagggaagttctttcaccagaatctacttcaagcactgttctaaagattgagtgggccatcactgttcaactcccaggacagactggtttgtacctgggagtttgtacaccatcacaacaccatcacccatcatgcatttctttggcctggctagtactcatgtactgatctgtgccccaagagtaaagatgaaatatctagggcatgaataccaatgatgtaggaacagctcatctgccatcttgaagttaagtcactttctgtaatagatgttatgtgttcatgttgatggagttttctctggccctgaagcttagatctgttcagtggcatatcttgaatatatagtatcttgagtaatgagctcgcttttcaggctagggtcagaaccattgacttcatcttgctcctatatcttgccctgtctagagagagagagagagagagagagagagagagagagagagaacttggttacctgctcttggaatcattcagaattccatccaacctcctccctttttccctgttatcatctccaagtcatcttgcctctctccacccagtttatttattccaaaggtcagagtggtatttgtgacattcacttttgattttcagcttgataaaattttttacattgcctagacagggaggccttagtgaggcacagcattgggtatgtctatgaggatcagagaagataactaaagagagaagacacaccctcacacaccctgaatgtgggttggcattcttaatagcgttctcacgcccggccaggaagaacacaacagaccagaatcttctgcggcaaaactttattgcttacatcttcaggagctaggagcgcaaacccccagccccaaaagcgaaagccaccccaatcttacatctttaggagccagagctccggcgcgccaaagcgcagagcgcgctctattgtttacatctttaggagcgagcgagcaggcgccagagccagagagagatgccagcgagagagaatggcggaaaacccgtccccttttttaggagcgttatatttcgcctaggacgcatcactccctgattggctgcagcccatggccgagctgacgttcacgggaaaggcagagtacaagtagtcgtaaaatacccttggcacatgcgcagattatttgtttaccacttagaacacaggatgtcagcgccatcttgtgacggcgaatgtgggggcggctcccaacatctcccccttttcttttaataagagcaaataggccacccatattaatgagagtggagatagaggtcaaatccccagtgtgtaggtaaaggagccgtacacataacctcctcccaggctcatcacccagaggggtcctggtctggtcccgtgttgtttttcctgggggaaggacacttgaacactcaaccttcttgaaagatgacatgtctccctagaataggctcattttatgccgcagagcccttctattgcagtgcttagccgtgcaactctctcgggctgctgaagcacactcactctatgcccgtgcaatgagactagcctcatgggatataagagctgagggccannnnnnnnnnnnnnnnnnnnnnnnnnnnnnnnnnnnnnnnnnnnnnnnnnnnnnnnnnnnnnnnnnnnnnnnnnnnnnnnnnnnnnnnnnnnnnnnnnnnnnnnnnnnnnnnnnnnnnnnnnnnnnnnnnnnnnnnnnnnnnnnnnnnnnnnnnnnnnnnnnnnnnnnnnnnnnnnnnnnnnnnnnnnnnnnnnnnnnnnnnnnnnnnnnnnnnnnnnnnnnnnnnnnnnnnnnnnnnnnnnnnnnnnnnnnnnnnnnnnnnnnnnnnnnnnnnnnnnnnnnnnnnnnnnnnnnnnnnnnnnnnnnnnnnnnnnnnnnnnnnnnnnnnnnnnnnnnnnnnnnnnnnnnnnnnnnnnnnnnnnnnncatgggtaaatggaaaggcaggagtgtggttgggggtaagggataggagaattggggaccagctaagtgctaatgttatgctaatttttgttcctttgtttcctaatccattaagatgtcaacatatagccacttactaccatgggcaggtcccacccccagttcatccttgcaaccaaggcctgtatgccttaaactgtgggccatttcctcctttaaaaggtttcctatcaggaacttgatcacaacacactttaggttcccccttcccaccccattcccctccacttcatcaattgctataaatttacagttgtcctggcaatcaggatgaagaaatgaaagacttagctcctttctttctagaagctgataacagagttcaggagacagacagatgtgcaaataagtaagagtcatacagagtgcaaacgcccaaaatggaaggttgtaccaaaggttgtctgggagtgctcactacagacagtcaaagaaggcatcatccaagagcaaataagaaaatagcacctggccagtggcataagcaagtaaaacactctatttacacagaagaacaaatgactaatatcagaccctctcccgagtacaatgtgagaacggagcaggaaagcatccagtgtctggagaggatggctagatgacacgaacatactttctccttggttttgtttacatgccatcctgcaaagaactgaaatgcaatttgtccaactgagtcctttgccttcaggtcttgtacctcagagatagctcatgagccttgaagcagtctcgtcaggaccctgtgctttaccacagtgaatgaatgtctcaaaagaaaaggatgagactgcagcaaataaaaaacagccttggaattcacagatttgggttcccatgtgcatctgatgttagctggacaggagacaatgatgaggtaggacctctcatctctcttggcctcagccttcatctgcagcatgatagatttccattacaggaataataattgaaaattcttcatccttagatatttagaatgcccaaagaagagcttgtgaaatttcagatttctagtccctacttccaaagactttgattcatttgtatggagtagagcacaagagtcacacttgaagtgaacacgttgtcagtttggatgcatgtgtttcctaaatggaagaaccaggagtctatgatataagacacgaagacgggagttaccattatattctgtctcacattcacaacgttttctttaatttaataagaagcctaatctttgacataaaactgcattcacagacattcctgcgtcatgggtgatcgatcattcagtggatcatagcgataattgcgtaaagggtgttctaaaatattttactcatcaaagccaaactaagaggtatctaaaagtgaaggtctgtgagggtattgactttatcgggctaagtcacatacatggttttggggaggggcttgcaagcatgctttgtgatatttcacagtgaagtgtgtcactctcagaagctttcatggagatttatgaccctgggagggctggctagttcagataatcgccaagggttccagaatgcttgtttaatccttttcaacttcatacttcagtgctctttgggaagattgaaactcccacaactgcatgggcagagtgaggaggcaagctttgtagcccttcattgtattgccagtcactatgtctcagactgtgtcgctgtcttctacagagtttatatgaataaggcttatccaagaagctggaatttgatctgtgacctgacaggtgattggactaagagaattccccgtggaaatgtgatttactagagaacatgggacaatccagttggttgctggagtggaaggcataccattttcagcatctgaataagcagttattttcctctatgccacatggcctgttgattcaccactgagtatgtttttgttgaggatatgctatgttttatgcaattttggggggcatgcttgcatgataattgagacagttgctgggaactaaccattagtccttcgtaagagcataaaacactcttacttgctgagccagatcttcatgcattttacttatattgttatgaagtcagtccatcccagtatttatcaagtaccagcgtattctacagaatccttgttgggttatctgtgtagagacaatttagagaggaaaggcatttggactagaggaataccatattccgataacaaatttagaaacttcatttgtgctattaaatacagaatgaagaagtggtacaggaaatagaagcccactgaggacttggggtaaataaatctgaaaaggttataaaaggaccaaggaagtggaagctagaggtctcaatatctgagtgagtgctaggacagagggagaagaaaaaaatggagaaagcaattgaagattttcctcaaacaactaggcttggataactgagtgtaccactcacaaaatgagattcccacagagagcagtctgaggaccagagggtagtttagcatttggccacaaagagcccacactcttgacctctagtaaacacaatgattttcggatcccatgacaggtaatcattgtttcttctagaaaaatgcctgtgtctctgacactaaatgagccatgttgcggaaggtttattgattgctataatttgatgccaggagacaacctcctgtttagtctctggggtgggggaaggcacttgaagacctgagaaagaacagatgacttcatttgtatggcttaatcagtatggaaaccgcaagttggtggtgtggcatttgctgccagcctggaagaagtcttgacatagtcaggcaacttgatgactgtgcccttctaagataagcccacttactcacttctcttgttcagttattgccaatgaaactaccataggtatttgagaattggaggattttcatgaaaggaaaaaaatcctaaaatcataggatccaatttcacaaaatgattcacacagaccagttttgcaaggaccatattcaagccaaaagtgaatatctaagaaagactgaccacctatccatcagatgatacaaaggaaactcaagtattccacttagattcataaaaaattgttgtagaccatattttatcacagctattgattttgacctctgcccaggtctaagtgtccataatgcttcactgatttgcttggaatacacatctcatttatcattgagaactataacattacacccttgaagtttaagactttgggaggcccagttaactgttgtggttttttttttttaattttttagggtagcaatcatagatgttcagatcggaatctctgggtctaattgagaataactgcctggggctttgtatagacttactccaggaactctctaaataattgaaaacaaagtctagggtgatccagtaatccttttccagaagggcatatgcacatagatgagcatttgtgtatggatgaacttgtgtgcatgtgtgtttgtatatgtgtagaggccaaaagtcaacccctgctgctgttcctcagaaactgcccattctatgttttgagaggaatcttatgtgtctgaagctcaccaagtaggcttgactgacaggtcagcaagccccagggagccaccaagggtctctccattgctaagatgagtgcacaccaccacatttggctgttttttttttccttatggaagtcaaattcaggtttgcatgattgccatgcaaatactttaccagcttaactatctccctagcccccaatattctttttaaagataatttatttgattatgtatttatttactgactgatatggtgttgtttcatcccatagccttcctatcttaattcacccattcatgggcaacttcactgaattatcatgctttctttgctagtgtgtctaagacagtttggaaagtcccagatgacatgaaaaaactaaaagtttacactcatttgttaaggctgaaatttctaccagttgttctttgtcaaaaagagtcaattctcatttagaggcagactctaaagaatatttccttatgagatagaaggatttgattccatgaaccagccaggaaggcaccccatctcttccatccagataaagtcaaacacatattcgtaagatggacatgaggagaacaagcttttgacagtgttaagtagggtcactgacctatctcatcaggctattacaccagtaattgaacttttcttctcattcaattcctattactggactcttggatagctttatttgtctttgaggatatggaacacatcttgtttgcccagaggtaaaagcccatccattcaccagtgggaatggccctccttgtaactggtcctctgataactactttgggaaaacaacaaaaagtatgggaactcaattagacagttccctggctgctataacattcgctatcttttcaaagatagatttgaaaaatggacccaccttttcatcaaaattccactctctgcatcaaggctaccatttgcaaaggaaaaatcaaattgaaatctattcacatatcctggcaatgcattttgaaaagtttacttcacaaagcatcaattttatgggaggttaataagtattaataacaagaaagaaggactgcagtcgggcatggtggtgcacgtatttaatcccagctcttggggtgggtgtgggggggggcagaaacaggcggatttctgagttcgaagccagcctagtctacaaagtgagtttcaggacagccagggatacacagagaaaccctgtctcgaaaaactcaaaaacctcaaaaaagaaaaggaaggaaggaaggaaggaaggaaggaaggaaggaaggaaggaaggaaggactgcatcttcaagtacatgtaggttgccttgggacagaagtcaacccatttgactctcgcaggaactcggagcgtttggcgtgtcagcgtgcaaagcacagtaattggatgagaagcaccatctgtcagcttaagcagctgctcatgctcagagaagctgtaggtacaggcatcgcatgcacgtgaagctgagggtgaccgtttcctccagttcctcattccagttcctcattccagttcctcatgctgttcattgtctatttgttttttctatggccagatcctaccaaagtacaatgggagtaattttcaagtttggagcataataatacacaatcttcccccacattatttagccaaggaacgtgtatgtgaatatttgcatttagatacaactggccatgagactgccttgtgaaaaagattttgagaaagaaattaattgtttgtttctttattcaatcaatgctatcgggtgtctgctatgtggcaaaaataatgacagagtattgggataggaaagtgaagagctctctttctttcaagaagaccaaataaatcaaggataaaaatctaatgtgtgctaggctggaaggtgcatttcagatggggtactgggaggttggaagagtttcaggaaagatactgaggtgttcataatagagttgattaggaaagctccatttgggataaagttgcagtgagtactggcctgtgaaagaatgataaaacttccgggcacagggaacggtaagtgtgtgctgtatgcaggaaggtgtgagcctcctatgcctgagaagctccatgatatcgatcgtgacccctgagacacccagaagatacaaatggaagtgtccctgagaccaactatcattaaacagaccacgattaaggttcagtataaaggggaacagaggatgtgaattgtataaagttaatacatgtttgtcaatacccttcatagagcaatgtgcacccattggatacaggacacacacagtaagagatccctagagctggtttcaagattgccagataaattccaactccttcaaaaatgttagctccacgaggcagcaactgtgtccatttcacctaccattttatgtatagcggctaattccgaatttttagatttttaagtacttaataatttaaagttttttgcttaaaaacataatctcatgtagatcagactcacctttaactcactgtagagctgaaaatgacttttaactcctcctcttcttacctttccttctgattaataacaaatatttgctgaatagtagagttgttagctagtcattgacatttatactcttcttgtggagaagacctcaaattcaatcacagaacagttggttgcccctataacagtcaggctactgttgacacaataggtacattttgcctactgtgttaatattatggttcatagaagtcatagccaagtaagaccattggttgatttactttgtcagcagcctgcatggaaccatccagcactaagaaaactagccagcaaagcagagtctttcagctgagtaccaacttaatttctctatattttgtatccaaagtgtgaggaatcttcagaattatggtcttatcagctagttcttgtgggcaaccaagaaatggcaagagcttgtattgtttggaggtcttcaaggttctccatagtcaacaattactacagaggtatcctgcatctggcaccaacgtgttttgttttgttttgtttttgtcttattttgttgttttttttttcttgtgacccattacttttaagactggcattgtctagtcttgtaggagatctgcctttgaactctcttttcttatattttattttattgttttactgaacagtgggattccaagagtcttatctatacccagttcatttcaattaactcccttgccccatccctttacacacatgccccatttctctccctgtttaaattttcatggatattttttgaagactctgtagactaaccatgggtcaagttctaggtgtctcactgatgataagtgatgaacaagccatggcttctctcatgatgaggcttaaaatccataggaaagagagatcattagctcagcaattataaaacagcatgatagattttctcatagagcatctttaaatgttataaaaatttttcagattcagtgaggcaaatattatcaatacacatcacctgtgtcacacctgtatttccttagtatttggtgacacagctgcccccacatttctttctcctttaacatccagtacctatatctaaatgggaggactagcctaaggctgccgagacagcctcactgcatggttgacctgaaatgcttagagaaacactttatcagtgattgacccacaccaggggcttaagtgtccaatcctgagttagaactagtagcttattcctataatcctagcacttgagtggctgaggcaggaggattgaggtaagtttatggccatcctgagctacagagtgagatcatgttttgttctcctccccagaaaacttcagttccaaggtatgagttctgttttcagacatacctgagagacagagtcaaaattcccttctcagggggctgcagttgggatataaagagaattaatgaatgaacgaaaataaaaataaacctcaaaaaaagaaatatttgtttgtgtcctcttctgctctgacctggttttccagtctcatctaagttgtttctagaaacacctttccgtgtgtcattttcatgggttatttcctggaggaccccatcacaagacaggcacttcaccaagtccagtactcagggaagacttctcagaagataaacctcggcagatgaacagtcactcgggtacattgaagtggtgcaaataagagtcttttggggataggtggctgacaatctggtattcctttggaaagacttcagttaggtatacatgacctccaacttccatcttatcagtccatttttgacaaatgttatggcgagcccacgtttctttcaggctgtatcttagtgctatgaaatccatattgcttcacgatcagcacttatcaagattaaagaaaaacaaactccatttatttttcctttattgacagattcatggcctacatccctgtgaataaatgagctggcaagaaggggaatgggacagccagtaagcttggtgacataaattacccttgatagggaaggctgatgtgggcatgtcatcaaattaatagctgaatgctaaggaccattacatttagcactgtttgccatatccttctatataataatgcctgagaataatgtgtaattaactctgtggctgactgacaaggccaaatgcagggcaatcaatcatattgtataaacacacgtccctgagtacacatgggaggcaaagggtgacttaaaatgtctcagcactttctgcctagattatggctctgagcttttgtgaggccagcagtcatagagactcttatctatagatctaagctgcctacagcatcttggtatatagtcttccttgctatttatcttgaccttttacttgtgttctttgagggggtgacaaaaaagagatccccagtttccctttgtcttgagtggctttcaatggaggtgttcacaatgcataagcttttcctgcagccaccagcccctgtgtcactcactattctttctgcagattgctttgagcattagctgtttagaatctctgtgacagcttccactcctctgactatgtgtataatgcttctctagtaactgatgaggaatgataaatgcttcttaatgatcttcaccatgagcaagtgtggatgagaccgattcggacctttcctcttatgggttgttttctaaaatttacagtggcccagaagaatcatctgctctgcccaggatagttacttatagcttcagaatcttccaaggtctgtgtggtaacaaggaaggtcaagacaatagctacaattcatttgagagagaaaattattttaaaaaaatatttccagccgggcgtggtggcgcatgcctttaatcccagcactcaggaggcacaagcaggcggatttctgagtttgaggccagcctggtctacagagtgagttccaggacagccagagctatacagagaaaccctgtctcaaaaaaccaaaaaaaaaaaaattcctttattagtgtgaaatttttctatgaggctactatgcaatattctcatattcagacccatttgtttaggagtgtgtgtgtgtgtgtgtgtgtgtgtgtgtgtgtgcattctttgaagtgaggaagaattattttatttatccatcatggaagagaaaccaagtcctcagagctatgacagtggctgtgcatctctctctctctctctctctctctctctctctctctctctctctccatctcagaactagatttagctacagtgtaaaataccttgtaaaagtattgccaccctccccttctgcccccctcttcctgcctattctcttatcttctccccctgaagatgctaccaatcaaacagaccctttcctcaataatgaatcaattgtccacctccttgattcagagtcctagtcagacattatctatcagtcagagttgtagtaaaagataaagcagcaactaagcatgtgtgcatgccacagacacactgctagtacgatgggtgctaggagggaagagctacctgcatggcatcaccttagacactggtgcagaactgcaaagatagagaatgagcctctctgtgaatcagatcattttaactttgtgctactcttgggttaatttcatctttgttctctctgatggtttagaggtttggctttccatgtccagtctttttatagccagccaggtcacaaagtaccagcagagttgacacttgggttagctgggttgctatggaaatgaaacacacctgaggctactaattagcatctctaggtcccacagttcagccactttctctcattccgagatccttcctcctgctgacaggttagtcaccttgggtgttctttactcaagatggcagctttccttttatttacattgccaagaggttggggatttagctcagtgatagagtgcttggctagcaagtgcaaggccctgggtttgatcctcagctctggagaaaagaaaagaaaaaaagaatatgtaatgggacatcaagaaactactttctttacaaaattgccctgctgactggctctcttcctctagcctcctgccccatttttcaaagtcatgcattttgtgtatcaagttcttctagttttatagattactaaagccagatgattaggaagcaaataccaaggtgatgtaagaccaccaccacccccagactccacatctcagttgcctcggggtaagttcctaagaagcttagagatcttcccgccttcctgttctgtctttaactagaagcatagctttaaaaaaaagttttgatatatgggctttctgagtaaaccaagctggtcttgaactcaaaattctcctgcttaaatcccaattactagattatagtcatataccatcctgcctatctagaagtgttattgcttttagggtgttctcggggtctgggtgagatggcttacttctgtatttatagctcttggaaacctgaggtaggatgatcatgaaattgaggccacccaaactacatggtgaattccagaccagtccagggaaagggggaaaaatgttctctggatctttgatctcttgaagggagaaaactgcaaagcatgggcctttcatagtgttgtgcatatttgcaaagtcacttctatgggctgggatgtgctctgagcattgctttgattgctttgacatgtgactcacaaaggaatttgtaggtaaccctgcatagctgcattgggagaatatattataatttgcaatgtaacctcgttcacctgaaagatttgagaacacaatcattgctaaacagattaccactctcctctgggtctctcttgtcatgtacaagtcatttgcttggcaggttctttgtaccctgagaattgagtttctgagtcagcactctgtgaaatgtttcttaaagctccaagcatcatcacagccaaagtcacaatggcacactaagatttatctttaaccagagatctaactaccagcaaatcatctgtgaataacaaaataaaaccaatttcaggtgttaaagagatacgtgcacccatatgtttattgtagctttacctacagtcaccaagatatggaagcgacctagaagtccatcaaagatagatgataaagaaaacacactatacactgttctggtttagatcttaggtgtatccccctgccaaagatcatgcgttgaaggcttagtactcagatgctggtgtctttgggagttagtaggtgagaccccattgaaggaaggaaggacgttacagagggcaaatgcttgtgaagaggatgttaggaccccagctccttcctctttttctttcatttctttgcttcccagatagcttgtaatgagtcacttcactacccctccccgcatgcttctgctgcaatgtactaccttcccacaggtgtaacggccaagcaaccatggactgaagccatgaatccaaatctttttctgaggtcatttgacatgatgtcatcaaagataactgatgccaggtgacaaaaggacccttcagtgaaatttttcttattttcaatttataaatgatagctcctcaggtgttcctcttgttaacagttacttatactcaaaatattatttttcttgatgcagtaatattgtgaatagagctcaagcctccagtttattatacaagcttgggctacttggaaatatacgaaaagttctcagtggtataacacacagtcgcagaaacataatactacctcagtagtaactactagctaaacaaaatacaatcttggaagtatgtagttattctgtcccacagataatccttagaattgatatagctactaaactttgttagattttattgttaatttggtaggccatgttctcctggtatcctccatctcttctggttcctatactgtctctcctgcccctcttccagaatgggcccacagagactgaaagagcaagtttagggcctgcatgggtctgccccaggtcctctgcatatacatcacagctattattagcttgatggttttgtgggactcctaatagtgggagctggtgtttctctgagtctttggctggcacttgacattctttccctcttattgggttgcctcgtccagccttaataggagggtttttgccttgtctggtggcatcttgctttgtcctgtttgggtgttgtgtcttggaggcctgtcctttttggaagatgaaatggagggggtatgactctgggggagagggaatgtgaagagcactgggaggggaaactgtggttcggatgtattgtatgaaagaataaagtattctcagtaaaagttaaaattttaataaagatttttctgtcttttaacacattaggaactccaactactaaaacccgttcaccaaaaaaaaaaaaaaaagtaaaataatataggatgaattataaaagaaagaaatggtctataaaggagctcttgaaacctttgcttaagtattttgaaggtagaattcgttttcattgactgtagtttttctgcttggagagcagttggagttgtactggcctctcagaccttgctagggcattagctctacacctttgactggacagttggagcttccaaacatctgtcaagcccacagctccatttcaaagggatcccttttggaaattcaccattggtgtctcatgcccgtgcttccttgagaacagataaaaggacagggcatggctaagtttgcccacacaagacctccatgagatcaagcctatcagaattgcagcatatatagaagcagagatttctgagtccccattccaagtagagaatctattggcagttgatggccaatgagagaaagagtaaattttcttttatctttgcaggtgctgtccctggtaggttgcacatgctgtaatgaataattccttatccatgcacatgtggtcagaactaactggatttagggaggatgatggtggtggtggtggtatgatgatgatgatgatggttattattttttaaacctcatgaagttaaaatagtgatagtctagaagctccaaggaaaagttatagagaagtactaagtaatgcatatgatcaaaatacattgcatacatgtataaaattttcaaggaataaatacatatcgaattttatttaaaaaaataagaagttgatagtttacattaggatagccaagctgagggttggccaagaggctatggagtgccttgaaatataatattagtcatcatagatagcagagaatagataatatttgggaaaatcagaacttgatgcagaagaaacaaggtaattagttataatacaggaactaatgatcacaaggtaactagctgagttagcataatagcagaagaggagaataactgtgagtcgttcctacttgggagattcaccggatgacccatttgctagggaactgaattttaaatggttcacagtcttaagtacttcatacgttccactaatacttgacctatccaactgttcctggaacccaggcagtgtggcaacattttttcctaggctattttttcccataaacctcccaagctaaagataacccaaattcattggaatcaaaatagcagaaccaatataaaccccccccaggagagaccccagcagcagatcaacagatctagcaagtgatggattgagcttacaatctttcttctcccatcttcacctcagatctctaggctcaggttttctattggcagagttgagattgtgtctctgctggcccttctaccatctcattacggatgggtcagtcaggtaaaatctgcacagctttgacttcatcagaactaaaatgcaaggaattaaggagcagagagagcataaaagagaaaggagagtgggagtctagaagattagcccttcccgcaaagcctttgctgagctacattaataaataattagcctggccaacttctgcaaggctttgcccaattatttgggcctaccaggcatagggagggctactgagatgctgccaacacattcaactataacacaggccagagaggacaaggtatttaacacatcctgttctcataggaactgggcactattcatatgagtgccctaacgattctggtattctttgatttattaaatgacaactgtgccttgcctgaagttggtcataaaatttttaatatcttagtctcaatttgtgattcatttcacttaggctaacaccacaaaagaagagcagtgccccttctcttagctctgacacatcttacaaacttcttttgtggggtcatttataatcattccagtgctgacacatatcctgtctcattttgatgagacaacaactctgtctgaactgcccaggcagatgggtagaagtgttggctttccatgaagctaaagcccagagaggtgatgctaatttttgcaaacccccagctattcttgattgttttctgatttgttgctcttttgtttattttatttttctattgatgtgaatgggttcctctctcaggaagtgaacacttaagcaagaaggggttgacaaatgcttgttcctattccacaagtcacctcttagttcagtttattgttccctttgccatacaggtttttactttgttgtatttctgtctgtccacctttgctttcattgctgtacacttggtgtcatacccaagaagtcatagtcgagaccaatgtcataaaactttccctctgttttcttcctggggtgcaggatttcaggtctcatgtttaagtccttgatccaaaacttggcttctgttcttgcataaaataagggtccatattcattctccaacactgaggtataagctctgatcagtaggatatgcttacaacaatgaatggcgtgtactgactgttttatgctttaaaaaaaaactttttattaattatttgtgacgttcacatcatataccccaatccctctcatttccctatcacttcatagttcccctctgttctcgcaacctactttcaaaaggaaaacaaaaagtctcattaaggaagctgtagagtgtcgaagtgtgtcacacagtacacccttttgtccaaacaccattacttgcaaatgctcattgcaagatgccattggtctgctttgaggcctccagcttctgctacactctcaatactggatcctcaccaggactcctctcagatatcctgttattgccctgagttagcccaccccaacatctattccacccactaactcctggagcatgtgacgggtccatcctacagatccaacgctgcatggtctccatgacactgtgcagaaacagaatatccactctctatttttttaaccatgaaaactttgtgacttgcacagaattcatgaaactagtgaggttctagaaggactgagtttgaatccctgacatactgaatagatttgttgaagccatgtctagatcattgtgattgttagctttgtcaatttgacaaaaagcctagactcacttgagaactagtcttctgggcatctctgtggggttattatgattgtgttaactgggatgggaagacccacttctacaacccctgcctggggtcctggtctgtacacgtgaagaaagggacctaggcagcaacattcatcctcagtagactatttcctggtcatgggtgtgatgtaactagttgcttcaaacagttcctcctgcaggacttcccaccttgaactatgagacagaagaaaccttttctcccttaagttgcttttctcagagtattttatcacagcaacaggaaaagaaactaatccaatcatcaatttccttgctgtaagaagaatattgatcgatcagaccatctgcaaaagcttacagtttcaggttctatccccaagccctttgggagctgtgagaacttaccagcttgcagagagttttgcaaagctgggctctcctagatgtgtcaaggcctcctcacagagtcacaccaaggcatctcactctctcagtattcttccctgaggagggttgatttgtttgcttttcactgagatgtnnnnnnnnnnnnnnnnnnnntcaaacccccagtgtgcaggtaaaggagccatgtacaggattagctcttaggctcacaggcttttacccagagcaaccctgacctgctcccgtgtcgtttttcctggggagaaggacacttggacactcaaccttcttgaaagatgacatgtctccctagaataggctcatatatgccgcagagcccttctactgcagtgcttagccgtgcaactctctcgggctgctgaagcacactcactctatcccgtgcaatgagactagcctcgtggggtgcaagagctgaatggccagcgacctattgcttaagcatagataaccatatatcaggggaagcaccatgttctagagctgcaagcgcctgggcaataaccaccttgtctctcctagtttgggccttaagcttacagaccaaccagagaagcaacactaatccacagcaaagtgtatctccaaataatatcaatcccacccattctttaaagaaggaaaatgctgaggagatccaattgggtaattctttgatcagggacaggtccaagcgcgtggagttgacctgaatgatggcaagtctcaattcccgaagggtctgttcaaattcagccgtccaattctgtaacatatactgagaaagactttttaacaaattagctgccctagtaaatttttcatactgaatggaagtaacgcataatgagaggtcccccaagctcccgacaaaccctgagccagtcttgtaaacctttgttctttcttggggctatggccgctctgcattcctgtgtggcttgctcataaataagctattctaccagaggtgcggcttgctctgaatctccaaaaatacgctctgctgcctctgtcattctggccacaaaatctgagaatgactcctgaggtctctggacgatctttgttagttgtccagtggcttcacctgcttgggagagcgccttccaggccctaatagccttttcatctgattcagaactattaagaactggctccttgagctcatctagtgatgagtatctcctagagacctccgctaattgatcttttttcttttcttttttcttttccttccttctaatctctccccaggtattcttacctgacctaaacttttcctcaggttcaagacctgtggaaaggcctgtatacttattttgtgtaccatatttcctctttgctcctactctctctccccgctttacttctgatagattgccctgaatttcatccagaattttcagccctgccttaaccgcttgataacatgtgaaaaggaacaaaaaggctcctaacactagagaaagttcaaggccaaacataccttgtaaagctatttcccactttacttctgatagactgtcttgaatttcgttagaaagttcaaggacagacttaccttgtaaagctattccccactttacttctgatagactgtcttgaatttcgttagaaagttcaaggccagacttaccttgtaaagctatacttacgggtacctgttccccagctgaagagttctgaattcacgcagttgaatccttctcaacagtctgttttacgggaacacttcattaccaccgttccccagctgaagagttctgaattcatgcagttaaatccttctcaacagtctgttttacgggaaccttcattaccgtgacccgcagttctggttccggaatgagggatcttccttgcgccggtgatggtaaccgtcccaggttttctcgtcccgggttttctcgtcccaggtcttctcgtcccgtcccgggtctcagcaccaactcttacacacgttcacgcgaccggccaggaaggacacagcaaaccggaatcttctgcggcaaaagctttattgcttacatcttcaggagcaagagagaaagagagcaagagccagagcaagagagagaaaaagaacaagaacaagaaagcaagagagagaaagcaagaaaaagaacaagaacaagaaagcaaaagagagaacaagaaagcaagagagagaaaaagaacaagaacaagaaagcaagaaaaagaacaagagcaagagaaaaaaagaacaagagagagaaaaagaatggcaaaaccccgtcccttttaaggagaattatcctccgcctaggacgtattactccctgattggctgcagcccatcggcccagttgtcatcacgagaaaggcagaacacatggcgggaaaactgcccctgcacgtgtgcagattatgtttactacttagaacacagctgtcagcgccatcttgtaatggcaaatgtgagggcggctcctcacaacagaagaaaccttttctcccttaagttgcttttctcagagtattttatcacagcaatgggaaaagaaactaatccaatcatcaatttccttgctgtaagaagaatattgatcgatcagaccatctgcaaaagcttacagtttcaggttctatccccaagccctttgggagctgtgagaactttccagcttgcagagagttttgcaaagctgggctctcccagatgtgtcaaggcctcctcacagagtcacaccaaggcatctcactctctcagtattcttccctgaggagggttgatttgtttgcttttcactgagatgtacctcctcagctgcatcagagctctgaggcagcaagtgacagactactttatctgtatgcctcagtgcctttgatcttttgggaccctttctgagagtgtttaagacaaaatttcacaactgccacaaataagagacgcctgctaccttaagaagcagggctaagccgggtgatggtagttcacacttttaatcatagcactcaggagacagaggctggccgatctctgcatttgaagtcagcctggtctacagagtgagttccaggacagcccgagctatacagagaatctcagctgcagatcacaatctgtcaggaagaaaactgagcaggaaggaaactagaactctggcaggcatgaaagtgggagctatggaggaatgctgctttctagcttgctccctccccaaggctctcagcctgcttttctgtacgacctagcttttcagccaaaagaagcaaagctgcccattgagtttattttgcaccctgcaactagaactaatgttgccatgcccaaaacacacacatacacacacacacacacacacacacacacacacacacacacacgcacacacttctatttggatatttatagcaatgaagcagaatccctgtgaacatattatttgggctttgagaaaatgtaattcttagtaagtattgtttactgcctccttttcaaacttctggtttgtatatatatatatatatatatatatatatttggagttacaatcaatagcaagtcgttgtcttatgtccatgccataagtggtcctcagcagactgtacagtaatctcagaggtggggcgtggtgaagctttgttttctatgtgcatgtgtctatgtccatcaaatatcatcagggagttgtgctgtgaagccttcagttagggcctcgggtcaacacaatagctaccatgctattggtcaccgaggcacagacagaggttagccgtataaacacatcctagtccttcatgattccttccatcagtgctcagagcatttccctgtactctaatgcctagcaagggtcctatggccacccccaaactgaaagggacagagaaatgtagccttagtctgtaatgggaacaaaaaccaggcagagtcaaagcaccataggcaaacttgataaatgggaggctcatgggttttttttcttaattcagaccattttcaaggctccctgggatcacaatttacttttagcatttgtcagccaagggaacggggagaccaaaacgttagtggaaattaagaaatgagttttagcaaaattttccttcttgttgtggggttctcgttttggttgtggtggtggtttttgttgtgaagcgaaattggggtttatttaaaaatagagaggaaacatacttaaagaaagaataaagcacacagagagcatgagtgtgggcatatcaaagaatagccacactcaactatctctaatagtcatgtatagaattcggatgacttgtaaatgttactattttattggcattattaattattaataattatgggttttattataatattttgcctgcacataatatgtttcaaccataaagtctaagtaaaagaaactgaggacctgggaaaatggctgagccaataaagtgcttgcctgccatgtgagcacgaagatccaagtttgattccccagcatccatgtttaaaaatctaggtgcaataatgtgtgtttataatcccaggactagcaaggctgaacaggaggattgctggggtttgctggccagcaagtctaactagattggcaatccctaagttccattagagatcgtccatcaattaaagtagaaagtagaggaagacaccnnnnnnnnnnnnnnnnnnnncacacactcacacacacacacagagacacacacacacacacagagacacacacagagacacacacacaggcacacacacagacagacacacacacagacacacacacactcagacacacacacactcacagagacacacacacacagacatacagacactcgcgcgcacacacacacagagagacacacacacacagacatacacacacacacactcacacacacagacatacacacactcacacacacacacacttctatgtaacacatacatagacatgtatactcaaaaacaaacactcgatactacacataaagaatgagaatccttatcactacaatatttcatgacctcgacagtgcttgtgtggtgtcagctactcaaactcagctaccagccccacctccccactcctgattaccactcaactctcagtcactgctgtaggacatctcattctgctttctagtctgtttccagaacatgaatatgatgctctttattctgcaagtaaccatcagcacgaatgctgctgtgggtaccacactgacagcagtcccagggttaacaggagacaagacgttgtgaggggcaccagggaatccgacgtcattgcttccagtggtttttgtttgtttttgttttgttttgtttagcttgcctcctccctcctcatttgctggatctgtatgttagtcgatattcagtcactctgacaaaattacctgagataatcaagtaaataagaggaaagatttgtttgtgcttacaggtttggaatctggagtacatggtcaataggcccatgaacatcctggtgacagcatatgaccaaggagacctgctcatctcaaggtggctaggaaacagagaaaaaggagcgtctgaggtcttgtgcttcttcaaatgaaaagtgtctcctataggctcccatatttgaatacttggcccctggttggtgacaatgtttggaaaggttgttgatcctttagaaagtggagtcttgtcagaggaagtatgtcacagaggaaggctttaaaactatatagtcttgtcacagttccagtttactctgttgcttgtgatcactcagcttcctgctccaacaaccatgccaatttgctgccatgtctcctcaccattagagattctccctctggagctatgagctaaagtctttcacaggtcaattttggccatgctgttttatcaaagcaatgaaaataactaatacagatctgacaatctacgttcagagcacacattagtcacctaactttcttctcctgaaagttccaccatgttctaataatgtcagaggatagaggccaagcttgggtcttcaatgcctgggtctctgaagaacattcaagagctaaggcatagcagttcagtctcagccttttgatggaaactgtccaaattgttctcagtccttaaccctgcttatcaactaggagtttccttattgtttcaagcaaagtacttccctttgtcctcacctcttccatcctgggctgtgctgatggatgcattctttattcactggtagtaatattattgttttctaagcaaaaggcttatctaacaaattttccatgctcaaggtgagaaaaactgagaaattagattgtttttcaagatgcctcaaacagaaaaataagtcttagggaaacaagtgttttatacagtcccaccaaccttactttttattagtaaagaaagtttttaaaaatattctaagcatggattataaagtgtaaatttggggagactgatggtgatcagattgtgaaagatcttggaagacctattaatactcacttttattcaaatcaagtaattagcataattaatggatcataaacttaggggaatacaagggaggctaggaagccagctgggtggctattgtagttagtggttaagaagaaatagagaagggaagagaagagaagagaagagaagagaagagaannnnnnnnnnnnnnnnnnnnnnnnnnnnnnnnnnnnnnnnnnnnnnnnnnnnnnnnnnnnnnnnnnnnnnnnnnnnnnnnnnnnnnnnnnnnnnnnnnnnnnnnnnnnnnnnnnnnnnnnnnnnnnnnnnnnnnnnnnnnnnnnnnnnnnnnnnnnntgaagttgagcaatgtagagcagacagcatggagatgacccatgtgtggtgtgtgtggtatgtggtggtaaggacaaatattgtgaatggtgcccatttccaatttgtagtagctacatggatgtgggtgcaatttattgtaataaaaattaaatgagtaaggatgtatctgggggtgggacacatttctttgtatatgtgtaaggagccccacctgatccaagaatgggtctgcaattgagcatcttagacagactggacagtagaaatctgaagcctgggggaagatagagatacctttaggacactgcttttctagaaggtacctccaagtaactctttctcttgaccttgtgtggtgctccctcggcttcaaatgtaaacgtgaccatggaataacattcactctaggggaaaaaaaaatcagaaccttcctctttacctagttatggacccaatcagagggcttgttgctgatttaatctagtcactgtaggaattgtttccaggacacccagaatctcacctaaacagcagtagatgaatctctctggttagacatagacagccgcagctgagtgatggatgtggaatattgttcaccgtcatccatccatttctcctgcatgtaccatgaaagctttcactttttaaccttttcatttggttttgttggcattgtacttttatcatcaagaaaatagaaaaaaataagactaatatcactcaatcaaaatcactagcaggctactgttctggaaactgcaaattctcgaactcagacatcttccagctataaacctgatactgtctgtggtttgttttttgttttgttttgttttgttttgtttttgatttttgtttttgtttttatcagagctggggagaaaaggcatttgaatctcagcaggacagctaccttcatgactcaggctgtcattcactaggtgtcccttccagagagtcatcccttccttctctgggacttactcgtttcttctgagaacacggataaattatcacagtgactgatgtgtcacagggctgtctggaggttgtggccaacgtagccaaagaaaaagctctggactccaaagggatattacgtcaccacattgagcttttgttccagaccaagcatctgtcacatactcttcctcattaagtcctcattgctggaagctgctgggataagagtcttggaaaagaatcatccttttgtcttgcagtgcatagtgtgggactgggactccaacggcaagcatgacttcatcggagagttcacctccaccttcaaggagatgagaggagccatggaagggaaacaggtaggtggttttgccccagacactgtctaggattcacctttagctaaaagtggaaaggctaacagcaagtcttccatatatgaatgagcccgataaaaagggaagatggtgggatttgattctagaaccttcccaacccaaagccattctgcaaccctgaaatagcaattcctccatggggaaaccagagtggttcaatgagtgtaggtctaatttcctttagctatgcagtcttgggcattgctttcccaagggccacaattaaagtcaactctaaattataagccatcactccttgaataataagggacacagcgagagaaactgctgctgcattaaatgtacagagccaggccctatcgagctaataagtcaatgccagcttaccaatgccaccctctgtagttgtaaagtgtctcataaagttgtatcttgccctcctctataaacagaaataggcaaatcaataaatattgaaaacattgcatctttgggttcccgagatgccattaaaagtaagattataacatatatcatcattgaagaccaccatggctagatgcttccagataaacaaagataaatctgcaattcccattgaggccatgaagtgcaggccactgtactttctgtatctgtgagatgctagtaaaatttagttccacatcaagactccatgctgacacatttatttgttgggaacgattctcctcttcggtgatttttacaacatccagtgtgcttggctttagatgcacaatggccaatcctgccaacattgtctctgttctcctaaagctaacagactgatgggagtcaaagtatgatctaaacatgaacgaagtaaacaaaaattaaaaggcaattacaacttgtgacaaatgttatttaaaaaggaaagataggactgcaaagatgacgcctctgattaaggtattgctgccaagcctggaggcctgagtttgatccctgagatccaaagaagtaggaggagaaaaacaactcctgtaagtcgtcctcttattttcccacatatgcatggatcattttcatgtgcacacacacacacatatacatgcacacacatgcatacacacacacctgcattcacaagtgcatgcacttatgcatatatgcacacatacacacatatgtactcagataaataaatgtaagtttctgaaatataggatagaaaccctccaattagggagtggattacaagttattagctggaaaggtcacatttaacgtcagaccctttaaggatgagagaaggcaaatctggcagtgagtaagggaaaaacatttcaggcagagagaacattcttaggtactgatgcaggaacgagctggtgtgctggagtacttggaaagggaccactatatcgggtgcagagagtgtggggtgaccttgcatgggaagcaatcaaagacagagcagaggtcaggaagaactgactctaatacagtcctccaaatgttaggaagacataattaaactgtgctctccaaaactatggtggccaccagccacgtgtgactatattttgattagttaaaattagattaagaaacactgttagatccatctaatgaagctggtggctgtggtattggatgacaagggcacagagtatcccaaccactgtagaaagcttcattggctgatgctgaaaaggatcaacctgattcaaatttgctaaaaggttgtgtcagtggcttggggcaatagctcagttgataaagtgcttgctgtataagcacaaagacctgtgtttgatccccagagcccgtgttaaaaagccaggcacggtggtatgctcctgcactagggaaaagaaactaggagggtagctggggcttgtgggatggccagcctggcctacctagagaaatccatgtcagtaaatgtctaatctcaaaagaatgggatggattgctcctgaggaccaatacctgaaggggatctatggcctgcacatacatgtacatgtgtgttcatgtacaagtatacacacacacacatacgcacacatgtatattcagagaatgctttggctaccgtgtaagtatcatttaaagagagaggaggaagaagcaggtcaatcagatgagtgagaggataggaaccttgaacctgaggaccctagtatacctatatcagagggaaaaagaggagacccatcgttaatctccctttccctgcctgggtcatgatgctgacagaatgcagtgatttaactaatcattaattcttgaccacccccataaatagctttagattgaaactgatcagtgggaaatttttataataccaaataggagggccctctccaacaccctcctggaaggaatcaatgtggtcggaagatctggagtggtcctgatgtgtgaggcttacagtgactagggaagtggttcagtcactgatggactctgtgagacactactgtgatctcttgctgagtaatgagttgcccactaacttcctgcccccaaacagtcatcattccttgacattttcttggttgtcaatttcatcttgttcacccaggatagctcctctctgcctattatggagccgtggaacgctcacactttcgtgcctaagcagcagagatggctagtgcatctctgtggtagtggtggtggttttatcctctaatgtataattttttttcacaaggtggtaaaataaaacttagaagcaagaaaaggcaacttcagaacactggttttccccagcttctgttctcaccacatgtttaatgaccttttggccaaaacaagtcacatgactaatacatgggcaccaaggtcattggaggccattgtgtcagtttatcctgctcacatctgcctccaaagctgctttttcaggcattttttgaatgtcaggaataaagttaggtctcctgagcagaagcctaaggtcccagctccttcaggatcagtaacagaaatgtccagtgaccgctgggtgcttgccttgcagttgcttctacctgtgagtcaattgtctatagtctagaagagatggaaactgttttagctactaccagttaatccatcagttctcagtgtctcccaaggcttttatcctgtccttcaaagagtatcttctggaatgagtgccaaggaaagggctgagaactgaggaatcataaggtcagctttagagatgagaaatccaaggcatagaggagtctagcagcccatcaaaggacacaaagcggggcaatgaaggcataagaatatccactaggcagtccattgtctgtcaatcacttccccttgtcattttcatggataccaacggtaccacctagagaccattttccaaccatccagatccatgtgtatgtccccaaaagcatgtaggatcttggcctcattcgatgacttgactttcttttgaagatgctcattttgacccttttggtgtaggtacagtgggaatgcatcaaccccaagtacaaagccaagaagaaaaattacaagaactcaggcatggtgattctaaaccagtgcaaggtaggtataatcccctctccaccaggagcataatgctaaacttgccttgtgggagaatttcaagtcatgtgatcaaaggggaagtgtttccacaagggagtgaccttctcaaagaaaagaaaatccacaaaatcaatatagtgctggacagaggaaatcaaatatgattgtgagtggcctaaaagctgtgacagcccaatgtcaccttccccttcccagggacagtcttgccctgaaaggcaagtgcaggtcatagctcaggctcttctgtgcacagggcagatctagaggaagatgctcaagtggtgtgggtgaagagactaagtatgagatattccttactctaaagtagtaatgactcttgaaaataaggtttgggtcttctccaaagggcagatgatgtcaattaaagcaatacatagactgaaataaagtggagcaaggggtgagaatctgcagatatcttgggcccatctgtattgatgttgaagactcaccacagatttctttctaccctttgtcttggcttaccagcctgtctctgaagtgcaggccttcaatctgtagggaaagcagagcatagtgttattaatccaggccctctttcatgcagatccacaagatgcattccttcttggactacatcatgggcggctgtcaaatccagtttacagtaagctgcttttgtgtttatcctttttggagcaatgaggggtgggaatggtattgggtttgtgaacatgcagatacaaaagatcctaaaagtcttgagcttttaagaactatggctaaaatattgtgtgggcccctgtttcttaaatgagtccatattccatctccttctggtgagtatgatccttgctcctcagcctcggagggtttagaaatccctcctaggatttttcccttttttaagtacctacatgtgacatgaggtgcaaggcaggctatagatttccagatcccatagctgggcaagaaggatgaaaaatgagccacgctgctctattccactgaactcagacagatgccttaattgtgcacatataaccagaacccaggcatccatgccatatccaataatcagtaccaaaggagtgctgtccaaatgctttctcaggcaatgagagtgtgcatacacacacacacacacacacacacacacacacacacacacacacacaaattgtgtctatccactctggggtaacttgtgttcactcagtcaatattcaaaatgttctgagatataggcagatttaactttcagaaagaacatacccacataacaaaatgtaggtgtgctggaaacaaaagaaaacgctatagattatagtacagaaaaggtggaatttgtacaatgcttacctctcatcttacaaaactatatttgtgaagctcagtcctctttagttcactctaccaaatcatccatgtgagaaaagcatgaaaaatgagtttaggttttgtatatgtttgagtccaacacaattgacaaaatccatgcgttcccagaaccaaggataatgctggtctcagaactagaaaggagaatcaagataaatggacatttaatggtccagtgtgtcattagcaaaagacttgtgtggtgatttgaatgaaaatggcccccatagtctcataggaagtggcataattagaaaagattagaacacgagtcctggttggagtatgtgtgccttgttggtggaagtgtgtcactggggatggtctttgaggtttcagaagttcaagccaggccaacagtcactctctctcttccttatgtctgctgatccagatgcagagctcttggctcctttccagcaccgtgtctcctacatggtgtcacacttcccaccatgatactaatggtctaagtctctgaactgtaagccagccccaactaaacgttttcctttataggagttgctgtggtcatgatgtctcctcacatgtaaagaacactaagataacttgttctaatgtaaagaaaagtcaacctatgttctgtctcaactcagcattgctcaccttacttttgaatacttacatcacttccttaaagtctaagattctacagtgacggagccacctgccctcctacacacacactggtacataaagaacacaaccagagcaagtcctgtgggcacacccatccaacactacctgtgtagcacacttattgctgatccaagtctatctgcagggcagtagcaaaacaagaagttttccaaggagagctactgaaatagtttcccaagataataggcaaaggagtgatgtcaagaagctatttataggttttcaagggaaagctctattgatttcggtttgttttggattctgtagatcctaggctcttgaacaactccttattcaaccttcacaggcttgctttgcccttggggctgtgctggatagcctcagccacccccacagcattcccagaccacatcctgactgattgttacttctttgagaatttcatataatgtgttttgattatatttaccctccttccttagttccctccaagattcaacccatttctcttcccattcacctttgagtgtccccctgaaatttcccataaaggccaatttgtgctacccagttcttcggaatgtgtgactttccaccagttggctcacaggatatgtactcttggatattcctgtagctgcttgactttgaaaggttgcttttcctgctctgttttcctcaattttctcttcttactaaccctccccaactgagtagaggctacctcaaaatttgccaccagcagcaccccaagtcctagctctctccatgttcatccccaccctcgtctcctccagtgccaactaatagtagacttgtgtgaggatctcagtcaggagcaataggaaggagaatgtaaaataatgctgagaaggggcagggccattgagggttccatcacaagccccttcctcctaaagatctcaggttagatactcaaaggataataagagttctggatgctctgtccaagaaaatgccccagtctcttatgccagtggcatttacttccaaaatgaagtcagctttctcattatgaagttcttgctgcttaaatagtacaatgttatgcaaattttaagctctagtacagttaattaaaaatagtgtgtggtttaattctgcctactagtgcttatgtaccacccagtaacttttttgcagcatggaaatgagtggcagagagtggagatatgggggtgggatgtgggcctccctggcatggagagggcagggaagagagaaggaggaggaaagtcattagaacctgtgcaccacccagaggcaaagattctcactggttcacgaagctgtgcatggctgctgagcaagacaggtagctttaggcacaagaaacttgggtcctaaagagtgatattcaagtgacaccaagttctagatgttctccacttcatcctacagacctactcttcgtttctcacccctgcctgagccccaagcacctgcactagccaggtcctcctacgttgagctgttgcttgggtatgttcattgataggaatcaatcagagatcaaacaggaaacccaatgcagaagaattattctagatttctgctttctaggtctgaaccatagagaccttgttgtttcataaaaggtctccattcttaccacatgccccgtccttaatatgctcttcttcctgagttctagaaacagttttatctaccctctgtaattgatttcatataatcttttctaaacatttgtggtctgtccctttattaaactctccatacttacctcttctgagtctctccaagagagactctgtctcatgtggccttcaggagtagagagaaacctttgtgtcttccatggggattgtgatgcaaaataagagggttaaagctggggaaactgtgcccaacaacagactgcctgagatacttttatttaaccccaaactgtctaggaagaacagtttgggtggatttttagatggattgacaaagttctaggaatttggtttgcagaatatcccccatggattatgtatgtatgtacataaattcaagtgataaatgctggaaacttacttgtgttaatatgaatggcaggtgtgttcaggagtgtggtgagaggtatctttgggtcagagtttgagatgacttgagttttgagagaatgttgtatgtacataacagaatgttcaaatggaccaagaagagtacaggaagcaataggcatgtgctttagaggcgaaaatctggagatgtttatcaagcactatttatcaaacgcaagtgatagcaatgaaggagtatggagagctgaagcatgaggtgaaagcaggggcaacaggcccaacagtaagagccattgcaacagacccagtggacgatgacaagaagggaacctaatgtggcagcgagagaaggggcgtgtggaagagaaagcaatgtgcctgggcctgggatacaaaaaaaggagatttagaaagcaaatgagtctagtatgacttggacttgctgcctgtctgacaaagcctagcagatgttgttcacagagaaatgcaagtcaagagagatctaaaccaaaggatggattcactttggggaatgctggaaggatgtttgagtatcccattgcatggcgtctacaaaggtaagccttgatcccaataaacaggtggaactgaatgtacctggatctggaggagaaagaaaagaatacagaaagacaaggtacccaatgacaagaagtcgtataagacctccgtgtgcaagagaaaagacaggaaaggaggcccagaatcccaaatggccagatggccagtcagggatcaggaggagaaagatacaagaccaaggcaacaatcctgatgttaaaaggagccttagtcagttatttctttttggtcaccaggacatctgagaacctgagacatgccaaagattctcccagtagaaaatgcgtacttgactttgcacataaccatagaaaattcagagcgtcccccaggtgagctccatatatacctcatgagaatcctggaggcacaagaacgaagataactgtggtgttgcagtcttagaggaggtgaatagaggtgaaacagatgacagagagaggcacatggcttggcacatggctgtgtatctaaaaataaaaccacatactagaacttcatagacaaaatgtaattatagacaattcggaagagacagatgctgtaagatgtctggaaaggagatggtggaagaattaaaggcttcctttgaaagctgtgacttttatagatgcatagaaatgttaattgtagcatagatttttcacagataggaacttctacagcttaaatgtccaacagtaaaacaactgtgtaaattacagcacttcatctaaatggactatgataaagccattttaaattataatttcaatggcaaggtaatcacatagagccatgtctatgatagcactgagtataaagaaaaccagaatgactctgtgagtacaactacgtactatgtactagatttcactatagtatgcgtctatgtgtgatttttatatattttatagtttgggtgtgtccccatgaagcatgtgctgaatccccaaagcaacagaattgggaagtgagagataggatctttctggaggtttataggtcatgaggaattataatataattataatatgaattataaaagagagtacatctgtgttctctcttacacattctcttctgccttccacaatgaaatactcctagagagattccagcagtgagcctatctttgggtgagcgttccagtcttctcagactgggcaacagtttgagtaacagagcaactctgggcaacagaggcaggcttgggtactccagcctctacaactatgaaccaattctatctctattatctgtaaatgacccagtctatagtattctgatatggcagtgcaaaatggatgggagaaatatataaaacaactagaaagtaaaataaaattacttactaagatatagagtcctgagcagtaacttttattaatatattttggcatggctactcatgatttgttgttgtaaaaatttaaaggtgatgttttccacttccctctgattttatgttgtttagtaatatggtattatagacatgaagccagatatgggttctctcatcctgaccatcaaatctaaaatttgggttatctattcaagaccctcccaggaaatctttccttattctagaaaggattacttagcatgccttatagctcctggcttaagtttctaaatctctactttagacacctgatgaactgtgacgcagaaaagtggtctctgtgtcctgaatgcccacacatagccagggtgcaatgggcagaggaggcaaatgttctatcatttccaagaaatgcactaagcactttcagggaaatagaatttattttttatttcatgaccaccccacagaattttgtgggaactgagaacaagagtttaggttatcacttaagaaatgtccaaagtccacatctcttactagacttattacctaagtccaaattgtgtggctgccttgggatatgacagtatacatgtgagttccaggtaacaagagagatccagcaactccctagattctgcttccagtggcttgtatccaacagagttccccccccccaatggccagttaggattgtttggtgtaaaaactaaaagtgtcagagacacattcattcttcacagttagccctctcccagatgcgccagagagacagcatctagagagtgccgggcctgctttctaggcctgggtttgcagagccactccacacatcctcaaaacataagctgcttcccaggagcctgctctctgctgcctgccgagaaggctggaacactcactaaagaccaggttttcataaagatttcccaacagaaaaggttcagcttgcttgctggcacttaggaatctgagtgtctgcagccacctcctgggacaggcattttcagtcttttttttctcaacttaatcccaacattcactgtctcccacttgttgctttctaaaataaatctaaccgttcattgcgttctcttcccaccatggctaactttaaagagcacagaactcctggtggaaggccacctcctgaaggtgggtattttatctccagcttccagagggatacttgggaaatggtttcaccatatagcccaggatagtctatagaactcgcagtccttctacctcagtcttccaagtacttacaccaatataccatcacaccaagttttgggttccctgcagttttaaagtgatcttctaggtagaaaggaaagcagtgatgtcatacttggccatcccagctctgatttaccttccaaacccaattgtatatgtaatgcatagtcttcattagggtttccattgctgtgaagaaactccatggccaaggcaactcttataaaggacatttaattggggtggttaagtgcaccagaggatgggggttcaattcccagcacccacaatgacatacttactccaacaagaccacaccttttccaacaaggcctcctaattgtgccgctccctgggataagtgttttcaaaccacaggtgttatcgtctctaagatttatctttttgagagaaaatggctgagaatggtgggtgtctgaaccaaactcatcccaggggtctagcatgatatgatgaatgccatctcctgccctgtagcccaggctgaccttgccttgcaaccctcatgtacccacatgcaacccatgtaccatgccttcccaagtgctggagtgaacagcaggtaccaacacccgcagactctgagcacctcctggatgttccttttaggaacatttttctagaattgcctgcacatattttgatcagaagtgtctgactggagcctcatgaatggatccctgggtgcttctgtctcttgcttagagttcatggaggttttaagtatcaccaccttgcatcccagtgttcaattggagggagcgctatgcactgtcttctctttctttgtgaagattagttctcacttcccggatgaaccccatctcaaaagacagaggcattagggtccctggggtcacctccatccatattcagtaaaacctcttcccactcttacccatctgccacatacattttgcttgtcctttctctccctccacaactggttagtcacagagaactaattggttcaagaccacttccccagaattgtcacagctacatcctgcctcccacctcaaagtttttctacctcctggccaggacccttcatttttcaatgggaattgttacatgagagattaaagattttaggactttttttattattgtcatatatttattgtacatagtggtagggttcataaagactttttcattctcacatagcgtgtattttgacagattcactgatcagacttcctctctctcctccctcagtagtcatcttccttcacagaatcagacaatcttacttcaatttctatatcctaaatgtgtataaatctatgtagccatctaaaatctaggctccacagaccagagaaaacatgcgatgtgctgtattctgcctctgagttattttgctttacatgatgaacaggatcccagtcccagccattttttctgcaggcaatgtaatttcattcttttttatgtctggaaaagactccatggtgcacatgtatccagtcatctactgatggattttatcttatttttttttacatataagcaaatgtaataaattttcctatggcaaagatattgcttcaagaaactacagtcagatacacaagaaataaaaacttactagtgaaaggttaaaatatcagtatatttttgtcctgaaaatgctcttttaggtgtataaaagaaggcatatagatgtaactttaagcccagccccatcatacagtacttgtatgtccttcactatctttgggaatcatggtaattaataaaaaagtaacaacaatttctatctacctgatagtttcatacaaagtaatgatgccaataaagcagcctacatggagaaaaagttttaacagcagttgttcctctctgttcatgataattcagagtcaggatgctttggggtgctaaattccctttccatgatcttccttatcacatctttgtactttgtaccttcattttatcagtagacatcccttgtcaaaattgaagaggtattctgaaaacagagttgaatccttcctgaaataattttaaactaagtcctgtaaagaagtaaggaagaaggggagtagcttcgttaaaaaaaaaaaaagcaaaataacttgtaaataaattgtagttagattattcttttcattttgattgattagaggactacaacctcagacaaagtcatatatttcttccaccatcattctctttaactatagcacttgttttccttctagatgcccccccctcacttctttgaaagtccagggaacattccagtcattgattataataaaattttctaaaattaacacagtgattcccatatcataatttccaagatcatgtgtggaaaatagagctttcttgctatcagggaaccagtgggcacattctagtatagtgcaaacagaaagaaaataagatgcaacatgaatattctactttcccccatgacttcacattgtatccttccccaccctaagctgaccagtctttgagatatctttgccgggttgactattctttcaatggcggtgctgttggaaagccaaggtgtttcctctcattttaacaccctaatcttaaagtattcattgctatattttgttgttaagaagtatttgataaagtttgcaagtccaatgggcctctctttccagtgatggccgactaggccatcttttgatatatatgcagctagagtcaagagctccagggtactggttagttcataatgttgttccacctatagggttgcagatccctttagctccttggctactttctctagctcctccattgggagccctatgatccatccattagctgactgtgagcatccacttctgtgtttgctaggccccggcatagtctcacaagagacagctacatctgggtcctttcaataaaatcttgctagtgtatgcaatggtgtcagcgtttggatgctgattatggggtggatccctggatatggcagtctctacatggtccatcctttcatctcagctccaaactttgtctctgtaactccttccatgggtgttttgttcccaaatctaaggaggggcatagtgtccacacttcagtcttcattcttcttgagtttcatgtgtttagcaaattatatcttatatcttgggtatcctaggtttggggctaatatccacttatcagtgagtacatattgtgtgagtttctttgtgaatgtgttacctcactcaggatgatgccctccaggtccatccatttggctaggaatttcataaattcattctttttaatagctgagtagtactccattgtgtagatgtaccacattttctgtatccattcctctgttgaggggcatctaggttctttcaagcttctggctattataaataaggctgctatgaacatagtggagcatgtgtccttcttaccagttggggcatcttctggatatatgcccaggagaggtattgctggatcctccggtagtactatgtccagttttctgaggaaccgccagactgatttccagagtggttgtacaagcctgcactcccaccaacaatggaggagtgttcctctttctccacatccacgccagcatctgctgtcacctgaatttttgatcttagccattctgactggtgtgaggtagaatctcagggttgttttgatttgcatttccctgatgattaaggatgttgaacattttttcaggtgcttctctgccattcggtattcctcaggtgagaattctttgttcagttctgagccccattttttaatggggttatttgattttctgaagtccaccttcttgagttctttatatatgttggatattagtcccctatctgatttaggataggtaaagatcctttcccgatctgttggtggtctttttgtcttattgacggtgtcttttgccttgcagaaactttggagtttcattaggtcccatttgtcaattctcgatcttacagcacaagccattgttgttctgttcaggaatttttcccctgtgcccatatcttcaaggcttttccccactttctcctctataagtttcagtgtctctggttttatgtgaagttccttgatccacttagatttgaccttagtacaaggagataagtatggatcgattcacattcttctacacgataacaaccagttgtgccagcaccaattgttaaaaatgctgtctttcttccactggatggttttagctcccttgtcgaagatcaagtgaccataggtgtgtgggttcatttatgccccagtacaggggaacaccagggccaaaaagggggagtgggtgggcaggggagtgggggtgggtggatatgggggacttttgggatagcattggaaatgtaattgagctgaatacctaataaaaaatggaaaaaaaaaagaagtatttgataaagagcagtacatagactccatcaaaaggttggccctctcttttggggctcgagagatggctcaatggttaagagcactagctgttctcccaagagatctaggttcaattcctagcacctacatgatggctcacaaccacctgtaattccatttataggagatccacaagatgatagcagtaatagaaatatctctcatcaaagagaagcccagatctactgccagattctaccaattttttaaagaggagccaatattattggcttctcaaatggttctatgaaataggaagacaaaggtccttcaattctaaaaccaaactcattacaaaccccagtaccactctgatgccaaactgtaaatgctcacaagtcaactacagttaactaccacgatgactatacctgttaaaattctcaataaaatgtctgcaaagtgaactcaagagcacatgaccaagttggtttcatcccagagaggaaatattggtttaatactcacaaaccaggaagcatgatcagcaaatgaataaatacacttgagggattgaaatcacatattaactcaagtaatgccaagagtcctgacaaacccaacactcctttatgataaaagtacccaagaaactaagaatagaaagaatacaaatcaacataaggaagactattataaaacaaacctaaaatgaacattatagtgaacagagaaaaactgagaccatttcttctaacatgtggaacaaaataggtgcccactctttcttactacagtgatcaaaaaccttatctacagcaataagataaaacaaatcaaggaaaggaagaagccaatttttttctatttttaaatgagacgaccctgtacttagctttggagatcttagctactttgccagaaaacttttagacctgatgaatacttttagcaagataacaggatacaaaatcaacacacaaaaatcagtatgcatatgtatatacaacttgacaacaaagaatctgggtgagttgggtgggagatggatatcattcacagtaggttaaaataactaaagaaaaatactaacaaaggacctgtaagggttctcaggaaaaagttgaagacagtagactttggatagacctccaatgctaagggattgccagaattaatgttgtgaataagaaggtggcagtgggaaaaggtttatatacagatccaatgtaataaaactctcaatgaccttttttatttttaaatattaaaaataatcttttactatatagaaaaaaattgctttaaattctaagcaagccaaaaatggaagccttagctcagctcatccaaggcctctcacacagtaggcaagcactccaacactacagtgctccctgacttagggagatacaggatttagatcccagaatgttaaatagtcacaactgtttctccaagagtgcaatgcattttggggggggcacattcttaaccaacgtttgccttgagctttcctgtaaccttggcttcatgggaacccttcaaaacatcgttgtgaagctgagtcagatgtctgacaatgccaacacaggcatagtgatgcttgcctttagtcacagcactacagaggcagaggcgggtggatctccgagttcagtgccaccttggactacataacagtgccccagaacatgccaattataaaattagtggttccagagaaaccctgcaagagatcaatggtaactattacagagcattgggaaatgaggtgatcagtggccttttcttcacagaagcaggaaaccaacataaagttcataaggaagaacaaagcatcccaaatggcgacactcttaacagaaagaacaatgctataagcactgcaattgctgccttccaattacatagagctatagtaggaaaacagcagctacagtgtggtgctggcacaaaaacaaacaagtaggccaagggaagagaattgaagacccagaattaagcctctactgttacagtcaccagtatctgacaacactggcaaaaacatccattagcaagaggacagcctccttgacaatggtctgagaccatttgattttcacatgcagatgaatgagacttattacttgccctacgcaaaaatgaattccaaatgagtcaaaaaccttaatttgagactcccaaactttgaaacttctagaggaaactacagagaaaagatttcaagatgtcgtaaccacagcagaaaacctgctgaaaaaagacatcaaaggaacagcaaataagctcaagaactgacaagtcgggaaggatgaaatggaaaggcttctgcactgccgagcaaacgataaccagagggaagagacaacacagagagtgggaagacagtctctcccaactccacatcagagaagggattaatatctagaatatataaagaactgcacaaataaaatgtcaaagaccatatcatgtgctaggtaaataggctaatgtctgatttgatagttctcaaaagaagaaatgcaagagcaggagaaatagctccaaggatcctcacacttgtgaggaccagagttcggatccccaaatccatgtgaaagccaaatgggtctagctgcaattctagtgcataggacacagatagggaatccctggaataagctagctagccagcctagtcaaacagcaagctctgggtttagcgaaagacacactgcctcaatatataaggtgcagagtgatcaagaaaggtatccagcattaaccttgggcatgtgcacatgtatacacacacacacacacacacgtgcacacacacacacacacacacacacacacacacgccatatacagggaaaaagaatacaaggggccaatattagatacttaaaaagctatccaacatctttagccatcaagagaatggagatttaaactgctctgagatttcatcccatcccagtcagaatggccatcatcaagaaaacaagtagcaaatgtggatgagggtgtggggagagagggatccttattcaatcttggtggggaatatagactcatatagtcactatggaaaccagtatggaggctcatcataccactgaaaacagaaccaccatacagccaatctataccactcttggcaatatacctgaagggttccaagtcagcatcctacagaggtgccacacccctgtgtttatagttgcaccatttaccataactaggcaatatagtcagatgtccccaacatatcaatggataaaaatatgaggtacatattagagtctgattcaggcaaaatgaaaagttgaataataaccctagccggacacaaggtggaaatcattatatgaagtgaaataaccaaactcagagaaactagaaaatggaccaagatgggaagaagaagtcttaagggacaggaggaagagaaggtaatagaataaatgtgataagcaagcagaggcggttgtctggggaagagtggaaatcagccagcagggtccacaaaacacagggaagaacagtttggaagaaggataattaagataaaatatgatggtgtttatgtagaaaaggacattaaagaaactcattgaattttatgataacttaaaatatattgtttttaaagaatgagttgggagttagaataatctcagaaagctgaaggagaaagactatttgatggctagacaaaggctgctcttctctcgtccccacctgcgatgacaagctatccaggtgtgttctgcattacagccaggagtcctcacatgcatgggagatgcttcactgtgtggctcctggaggcattttgttaaaaccaccccaatgcatatctctgcaactgactgcatagaaattagacagcagctttctcggggagtcgggattctctacacagaatttggccataagggttcttgtccttcacagatggagctctttagcccagggggcacagtagccttttcttggtggattatgaaattggagacagatgccccacccttacccttgatgcttggtgatgtgaatcaatagtgattggattttctgaactaccgtctcaagtcccatttagataggaagaagcgggggctattcaagacagcaaatctgacttcagtcaaattaataacgaggttttcaggaaactaacttctcttactttccttatcagccagatatgtcatatactcttgtttttctctatccgaggccatgtctccaggttggttatggttcctaacagtgcatttattcttatgctttccctcttccaggtagctatagacttcactgcctctaatggggaccccagaaacagctgttccctgcattatatccacccttaccagcctaatgagtacctaaaggccttggtggctgtgggagagatttgccaagactatgacaggtaagagacttcagacatcagctgtggtcttatctctgaggtgggaggtcctatggcccttggctgactcatggccaaagagtggcagtcagtttcggcatctcttgaaagaacggaataaaactttgtgtcaaacatttcatcctctgctcctagagaaactgagttggtgccacatttgctctagtgagccacaaatctccctcccnnnnnnnnnnnnnnnnnnnnntccctccctccctccctccctctctctctctctctctctctctctctctctctctctctgtgctctgctcttattaggttggtgaagtagatagatagcaaatctaagcttcattgtgtggactaagtgtgaaggtgtccttgctcctcacagtttgttcatgagccagcagcaccccgtcccgctgaattggattttacaacttgaagagattcttagacgtgtggtgtacacatctgagttttagatgcatggttttattggatgctcctgcatccatcctctgtattctatgcatcttatataatagccatgattattaaaagaataagactataggaaatataagcaatttgtatactgccccataaacagaaatggtatttgaaccacagtctttcaggttctacatattgagtacaaaatctttgtgttttacctatcttgggagctactggtaacattaacagacagatatgtctgcccaggtgcacatcaatgtggacaggaaagtgtgtgtgtgtgtgtgtgtgtgtgtgtgtgtgtgtgtgtgcgcgcgcgcgcgcgcgtgcgcttacatatatgcagagatgatcttaagattcaatcactattatttatttcttctagcaagctggatttgctgtcactcctgtgtcactggataaagggaaggagcacagatgtttacctaaggtttctggaggtggaaccaatgtaaacacaaaggtgcacctctcagaggactccctagtgtgatggggaaacaagcttagttggtaaggagctgtaagcagctgaccttttaatccaagaagataaacaaagcatctctgtgctctggttgtagagaaacatgagcacatatcgttatttctgttcttcctgagctcattactggtaacaaccactctaaaaacctgtttctgccagagcacagtaaaggacacacccttgtgaaacctccagcatgagctataggaaaggtccagtcagtctcctgcctgctgagatctctattcaatgtggtcagcaaaataccttagtgtagcatagagacacttagggattggcttgccacaccctatgcaatcactgagcagtaagcacccccccccaaactttccagtggctcttgctgcacacctaaagcatacttcagtaaccattttaaatcattgaggatctgtgatggccattcttggctgtcaactgaaccccaagcagctagggacacctatgggaggaatttcttcttgatttaagtcatttaaagtagaaagacttactttcagtctggatcttttgaggtggaaaaaaaatatacctttattttgacccacatcttctgatggcagcctatataaaggacatagaagaaggaagcttttttccctttgcctgcttgctctcactagcagctccattccttcactggcattagagccttcttcttcagaattccagtgaatactgacaactagctgagtcattcagcctcaagaaccaagcaactagtggattcttgggccttctgctggaagacagcgattgttgaactagctggacagcagcctgtgattctaataaatccctatacagagatagacagatagatagatagatagatagatagatagatagatagatagatagatgatagatagatagatagatagatagatagatagatagatagatattcattatataggctctgttcctctagagaaccctgactaatacaaagtgacacccagaatacttgaccttgaggtattgactgtgacaataatgagtttcagctctgacttcttcaggctctaattcagggacaatttctagtaaggtttgaagcagatggggtttttactagcgaggaaagagtttgataaattacatctacagtgtgtcagagacttcttcaagacttgggagtgggaatcctctcttttcctttacttgtgcataatcatgttaatgatgtagtgtaatatagtgtacatgtttggagataagactggaggaagtgttagcaggatccccaatgtttggaccttaagatgcatataatagaaggtaccttgcccagggcagtgatatgtactgtgctcaaccccaacttaagcaacatagtaaggcccccatgtaaaatagaagttaaataaatagataaaagaactgaatacaatacatatgtattgtatatatacatatatacaatatatacatatatatattataagaaccatgaacctgcagagaagaagacatccaatattgaattccacagagcagagaggccagttttctaaaaaccaagatgaggttcagagtctgcatcataatcctatatcaccttcatttgctcatctgggcaatggtccattatcaggaagcatttactggctaattcctgcagagagtgtccattccctggtggcttcccatgcagaatacagacacccttagtcagagccattggatgccgtaaagcattcatccctttcaaatgcaaaccagacaaaagttgacagatatgttgtattccctcaaaaacacatattgaaacatattcactatgtcaccctgggagttatatgaggtcatcagaaattattccttttaaaattttcgtagtgtaattctgaagtcatcattcccagatgaacaagaaattcaacttttggcaggccaacagagcaacacttttatttccgttttaaaaggcaactgaacattaaaatgggaaaattctaaagaagaaagggaaggttgaaaaaaacctctatgctcttttaagagactccctgggagagcttggaaggcaagcagctcccatgaaagctgacaaggttcaccagtttctgttttgtgtgggtggacagacaggagacaggcagagtcagaaaatttcaagtcggggttctggaattaatttattcctgcgtcaaagtcagggaggttggtgcttaaaaagaaacacttgcataaaaactgacagaagccactctccccctcccacaaccacacagaggtttgcagttcccatgagccttagcaactcctctctgcctctgacagccaaggactgtctctctgccctgtatactcatggctccagggtcactagcaggtgacccactgaacagagcagcttgagaggtacataaagctcttctccagatggccttgaagggaggttcccccaaccacaagataacagttcccaaagccagtgttgcccacactatacttcaccatctgcaaaggcatttcaggctatctgcctctcatgaaaacacatgtgaacaaaaacacacatgcaagtaatcacatggccccacacatcccagagtatgtgtacacatacacacgcacacacatacacacacacacacacacacacacacacacacacacacacactcacatttccctgctgtagctggcttccaggaagtgctatcaaagttaaaaccacagctcccatctttttttttaagatttatttatttattatatgtaagtacattgtagctgtcttcagacactacagaaaagggcatcagatctcattacagatggttgtgagccaccatatggttgctgggctttgaactcatgcagtagagcagtcggtgctcttacccactgagccatctcactagccccacagctcccatcttaaagggaatgaatgagcctttattttaaggccatattgaaggaccatggccttaaatttaggttaccctaaatgactggttccaaagaaagtcaaaaatcaaggcaaatttaaaatacacctgtgggtatatctacaaagagcttcttttcaagaattttcgttcacagctttcatattccttgtggacctcagtgccaacgtggcacgctttgcttggggccaggaatgttatgggtctcagacaaccttaactgtcttctaatgaaaagcctggtctgctcctgttggcataggcctgcaatctctgtgactttggaatgtgagacaggaaaactacaagttcaaagccagcctgggcaacttagtgatatcctgtctcatattttctaaaaataaaaacagagctagacatattttggtggtagagcacttacttggcatgcatgagaccctgagttcagtccctgataccatgaaggaaagggggaaggagggaggaaaaggcagcctgtctgtgatctaacgctgcaaacacagtgccagtttaaagaaatggccaactctgaatgcatttgggacacaagaaagcaaggcaggagtgtgctaggtcctgtactgggggagaacttgaagctgaaactcaagctgacacgagttttggtatgtagggcactgggttggtcagcagatgatgtgggttttctcaatacagcctctgtcacaccagaccttgtcgcatcaggattcttaccttgtctgcatgccaaaaccacttgggaagtttcaaaaaattttgatacttgggcctcactcccataggctgatttcattatctgctgtgcccctagaaatctgttgttgtgtggttgttgatgttgttgttgctgctgctgctgttgctgtcactgttgtcatgataggtatccagagttggaatccaccattaactcgcctgcagcctagataccactcttttgtgtgggacagcaaagatttaacatggcagaatttccccatgtcactcacagtctagaggaacacagaggcatgtcagtaagtcatggtgattcaggtgctgtggctcattcctgaaagcatagccagactgaagccagaggaccccaagagtccaaggtcagcctggaatacatcgaaagactatatctcagaacaacaaagcctagccccagctcagcataacccagaaacccttcctgtgtaaggataagaatggaaagtatgtaaggggaggaagggctcccacctcctccctgctgaaggaagagtgggaaggaagagaatcttgacagtagttattgggtcaatgagagagagagagagacagacagacagacagagacagacagacggagacagagacagagagagagagacagagagagacagagagagagagacagagagagacagacagagacagacagagacagacagagagagacagagagagacagagagagacagacagagagagagagagagagagagagagagagagagagattattagaacataggtgtataaatgtgcttattattctggatcattagaccagataagcctcctgtggttaatggagtctacaaggatgatttaaagaatgtgaggtcccaatgacaagtagatctaggttcatatcccagagccacacccctattctcatgagatttatttctttgattgcaaatcagaggcacatctaatttcctttgcagtgctcaggcagttctgcctgtggtaaataatcaatggtggaaagttttatctttaagattcagaatccaatctttaaaaataaactgaacacaaaaagagaaaggaatgtagtgtaggatctaaaggtcatgttggacaaatgacatctgggggtcttgttcctttgtttgttttgttcatttgcctttaaaaggattatgtaaaaatgcatagccttcacacattctttcatagataacatctaactttcttcatcatgactttaaataacgataagaattgaaaactctggagtgttataagtacttaaatacacttaaaaaataaactctaatgtaactcttgtagctgcccattggaatgtctatattatgccatgtagactagctattggcaatcatcctggattttttttttctcaccaaaaaatacctgaaccagctcttcagtttcaaatgtgtgaacttagattttttaacctacagtattactcaattctttcaatgatataacccacccaccaccccaaaaataacagtaatcaaaaactactacttagggtatagagtctggagagatggctcagcaattaagagatagatatcttagcagttaagagcacacatgctgctcttgcagaggaactaagttcagttcccacaatccacagcaggaggctcacagcacctgtaactctagcttcaggagagcgccctcttctggccttcacaggaacctattctcatgtgcacatgccaacagaaaaacatacacatagattattaaaaagggggaaatcttttaaatctttttattacagatgtggaggtcagaggacagctatcaggagttgcttatctgcttctaccatgtgtgcctcaagaatagatcaaattcaggtagtcagattcagtgccaagcatatttaccgactgatctatcttaccagtcccccaaaatacatttttaataacttaccaactgacagtaatccatcctaagttctttcttttatacagtgctagaaatttaacccaaagtcttttacatggtaggtagatgttctacgactgagctacacccccaagcaatttttaaaagtgaaaatggacaataacctgggttacagaagatttggttgttactgaatttcgtagaatttttcttttatctgatgtttgaatcttgtgcttgagagttgaatctcagtacttggttgttggtacttgaatcctgcagaatagttctttcttgatattcagtttttactctctgaagcaatacagcatagcagcacagtggatacaactcagaagaggtaaagaaaaaagtagttgtgaagggagatgcatggatgagaccaggcaccgctaacacagctgctcccagaagagctgggatgtgctcagcagacaatggagaagtagaagaactgaatactgattgcccgtttccaaaagaaagctacactctcatatccccagaagagtgttgcatctctatccataggattgttttaagatgactgtttgaaagactgttttcagccaacatccatgtcctctgagaggccaccttgtttgagttgacctccgttggcatgtagattgggaatttccttgacgtgtattagccccttgctttagctcagtgttttccttaatggagcgagtgaaaagcgtgcttcaaatcaacttctcacatggagatacttggacacagccatttcctgtgaatctaagggcaactggcatgtcactagggaagagcatgggcccttttgttgtgtttaccattgttttagtctgacaataagaaatgtggcctttcccagtgtggacatatacttctgaaatttcccagtggacagtgtttgcctgtctttttctcctgacagctgctaatggcccttatgctctgtggccaatggatccagttctgacttctttgaagtgttctcatattaaaagttttcttttgttcaacttccttcccttagtccttgcataagactcctctctggctcattttatttttaaacaggaggaatggactttaaatctattgtgctaggcttggatttttttccccttcagtatatttattaggtagctttctagtggttgacttcagagaattcagccttctggcgcattaattattctccttgtaggtgaggcattttccctacccttcctctggaaacttaattacataacagtgcatgaagctcagcaaactccaaatccccaaggagggtttagctggtttaaaaagaatatcattaaagcacatgattggtgattggaagtagatgcaacattatatctacccttcctcaagagagggagggagggagagagagagagagagagagagagagagagagagagagagagagagaagaaaatccatcagaagaaagcagagggtgtggcatctcccaggggcctagttctcactcctgaggtatccctgcagtggaagacccatgactcatgttccatcctggaaagttcttctcaacaaagatgaaaatgtagacactttgccccttcttagaattgggagcaaaacacccatggaaggagttacagagacaaagtttggagatgagtctaaaggatggaccatctagagactgccatacccggggatccatcccataatcagcctccaaacgctgacaccattgcacacactagcaagattttgctgaaaggaccctgatatagctgtctcttgtgaggctatgccggggcctagcaaacacagaagtggatgctcacagtcagctattggatggatcacagggcccctaatggaggagctagagaaagtacccaaagagctaaaggggtctgcaaccctataggtggaacaacaatatgaactaaccagtaccccccggagctcgtgtctctagctgcatatgtatcagaagatggcctagtcggccatcagtggaaagagaggcccattggtcgtgcaaactttatatgtcccagtacaggggaactccagggccaagaagtgggagtgggggtgaggggagtgggggggagggtatgggggaacattggaaatgtaaatgaagaaaatacctgaataaaataaaataaagttcttctcacttagccagcaagatcctccctggtcttccactcatttaagctaaggaggaagggctgaggcaaagtcttccaacctttccaagaaccaggaggttttgtgtctcctatttatcaccagtagtactttctctaacagatgtgatacaacagagcctggcttgacacagcaatgaggagacgagggagtgtgtggttttatggcggacttaaacctttacttcagagaactctggtttctctaagtctgtaaccccatctgtgtggacctaactgtgttggaaggttttgtcaaagctgtcatcagttgctagggacttctaagtcaattaggaagggctgggtaggaatctagctttgttgcttggattttctcaaagttgcttgagtttgctcagaaagaggggttaatgtcctcatttcctacagaagatattcagtggtaaacacctaacctgaactgaattcctttttttttttttttttttttttttgcccttgactaattctgtaaagaactgaaaaatgtagaaaccgttccaagaacaaacctcagttgtgttcttaataagagattaaaaaaaaaaagaaaaacaaaaaagaaaaaccaaaccaaacaaacaaacaaaccaaaggcagatgacttctgccaaggttcaatattccagaatgccacagcggcacatatgttgcttaagaaaggtctcattggttgcccactcagtgacctagatactgccattgccagtagatgattaatactacctatagctattacattatgatggcaattagaaaggcatgggcttgggaatcctatattcctctctggtgatcacttttttctgtctttctaagcacagagtaagtagaactcccaggattgtggataagtctgtctaacccctggggcagtggtatcagtcatgactcccttctccattctcttaactacagtgcaggttagttagggttaaggtactgaactgaaactcagtggtaaaggtgagaaggatacagtgcagtcagggttagggggtgctggaatgtgagatggtgatagagctggccacatgtctgcaagctagaggactgccatgtgttaggagctagtctaaattaatgtgcaatttccagaccaatctgggctacagagtgaggcccagcctaagaaacctaaggacaaacaccacaacaagaacttaacacaaaagacagtgtccctttgagttcaggaagtaagaaaagacatgcaaataatttcttgctgtttgtgtataagtttaatgtggacgatacagtgaatcctatcaacatgctttgttgggtagcagctatcaacgtccccgctgccttctgatggctccttagattccggagtgtctgtgtttgaaccctggctctaatcagcagcacaatcttgactgatacctctcctccaggtgtctgcctacaccaaagagagagagagagagagagagagagagagagagagaggggagagagaaagactaagctctttctttagttaaaatatatatgtgtgtgtgtgtgtgtgtgtgtgtgtgtgtgcgcgtgcgtgtatacacacacatatatatgaaatatcctaattcagtcaatgattggagttgccaaactcctcatcactatttcaagaaaacagaacatcataattggggggtggggggtaggatctgtataaatctgaggtccgtttactcttggctatctagcttagtaaaaactttaaggggagagactgtacattaatcagtaatgaacattaatgattgtttcttaattttgattaaccacgctattgcatgactcagcacttggcttggcgacatgccctggtgaggttacacaggctcctgtttctcttccttcttagatgaataaatgaaacagcttctttttatatttaattccagtgacaaaatgttcccagcttttgggtttggcgccaggatacccccggaatacacggtgagtgagtggacctaggatcttgtaactgcacacatcccttgctctctgtgtaactgtggatgtctaacccagagagcagagtgttctgggtatgttgttcaaaggcccagccagagggtctcttggtttaaactcactattaatatgatacgagatggagaaaacacccccaaaacgtttaactccgagaactcaaacaatatctattcagatctccgtagagattgtcagtgccagcgtgtatagtatatagctaggacagacaaaggaagacttgaggtaagtaaaccaaggagggaagctggaagtcagctcacttgtctggaatctgcggaggataaagggacagtgggcacacaccagctgcttcacctgtgacctcccactaagaaaggaggtgtctgtcttttaatgaggtgacctacttttttagcatccaagagacccaacgatcagaaatagcctttgaaatggaattttccatgaaatttcaagtgatttaataaaactgtccagatgccagaatagcccattcctttttatcagatcttagggggaagaaaatagcaagcggtgtgtcgcctaaccttacgcttaggcacggccaggcagggcggtttgtggtggaagattacagggtagatggcttttgtcacttattttttcagaagtagaagacactcgatttcacctgtgtgtacatgaaaatccccatgcactgtaattctggatatcagaatgattcttaaatgtcaacagcttagatagcacctctataagccgcaccatgtccttcgggcatcttgagttgaattctttttttaattggtggtacaagtaagcgcccattcaactttccattcaactttaacccttcagtccgtatccagttgaatctagaaaccaattaaggctactttttccgaagccttttctttctttttttttctttcctttttctttctttctttttcaatatgttatactttccccctccggtgagcatttatctgatcctaaaaaaatcttcctgtcacctcagcaccacagggagctgagacttcaccctccatctcagattgattgtataatggcttaaaatggtacccgctgcttaactcataatgaatgtaacgctatttgtttgcaaaccctaaacctccagtgcctccttaatggattcaagttgtaattctcctttcttcctcttttaaaattttcatcggtgtctaggtctctcatgactttgcaatcaactttaatgaagacaacccggagtgtgcaggtaagtcataaatgtgcagaaagccagtgtctcagagtctgtgacgctgtgcacatttccaggtccggcatctctctagtgaggcacatgggttgtttgcgtcaaagcacagaaatcagctctgaaaacccaaataagccacagtgctccacagggagctgagaaacacattataaggtaagcccacgcaccctcaaagagacagacagactggctaggagaaagtgagctgtcagcaagatcatggatccctccagccaaaacaaagttaatctattaattaaataaaattaatttattcttgattaaaatttcattttagctttgtttatttttgtttgtttgtttgttccttccttttttctttctttctttctttcttccttccttcctttctttctttctttctttctttctttctttctttctttctttcttttctttttttgaatgagagagtagcctatgatggaccaagctaagacattcctctttctgcttctctgcttttcacctgtgttttccacagtttcttttctgtgcaggtttaaggaaaggggggaggatgtggaaatcacttgatgctgccagcacattaacaatgctgacttggaataaatacgttggagagagagagagcaaagactcaacatcttggtccagaccattttactttgttttctcctggctagaaatgcctgaacttgatctcatgagataatgatgcttggggaacaatgataaggatgatcccatctgctctgaagaagtaacaaattaagctgagagcctctgtggctgtgatgttgacatttatagggtgtcaatgtccacactcctctcctcctccttattgagggagaagtgagatgaagtgaagggcgcagaacattctgcagtttctttcatgaacttggcatttactaagactaggatcatcagtgtctttggctctgagcacagtgccctcaaagtcaggatctctgctatcgtagtatttcctcccccatcactcaaaaccagtttattccggtttaagctcctctattctcctgatatccccagtctagctgaaaccctgagcttccaggtcaggaaaagactctgtcaaagacagtaaggtggtttcccaccaaaggagactggggtacataccgtagtgtttaccagctcacactctcagagttcaagtccccgatagtattgaaaaggaaatcaaacttccttctctaaggcaaaagtttgtgtgtgccccgcacccctcgcgccccccccccaaaaaaaaaacaaaaactcagcttcattttgcttcttttccatgtcgtaaaataatttggtttctttggaatggcaggcatctgtgtttcaggctgtcctaggtgggcggagtgttttcaaaaaggtgagaaacccatataaggcagaacagaagagaacttgctcatccgaattgttcacaggctgatttgcagtatatgatggctatggagaacaatttcaacagtgactcctgtgactccctacagtcaaaatcaagagcagtgtgctactttggtaccaagaaggagctaaagcaggggaaagcaaatgtcgcatgggcaacaacagcatccatgtgaataaaatggatttataacggcaatttatttctaatggtctttcatggggccaaagatcgcaggcagaaggacctctcccagcaaaacccctggcttttctttctcctgagaaccatgtgacctcagggtgaacacccgtccttaaatgagcagttgacctcagtcatctcgtaacacccagcgtataggcttgaaggctgtgtccacgtccatggtacactcagtgtcctctcagcactgctgcaagctcttctgtgggggatactgaaatggatgagttatgatccttgcccttactgggtgtggtatctggagagagggtcacaggtgcctgtgacagctacaggcagcagtgtttactctaaaatcaacaaggcgataaacaaacaaacggacctctagagccaactcacttagtggttctttcagctcaaacacctgtatttatacactgagtctgtaactcactttttctggcacctggggcactttctcttaacctctgcttctccacccatgaaactggagcagcttctgcctcctcaaaccttagtgagctaataaaagcttctgaggggtgaaatttgtgggaaaggttgcttttgaccacccattgtgatctgatctcagtgggggaggggaggcaagaaatactgacccagcatttccttttgtcttgagatcctacaagtggtatgaagtattattctggagaaagttaatgtgttgctttcgtgtgtatacaaatatatttgaatggaccacggaactgttgggtttttttttttttcaaatctcatcttaggaattcaaggagtcgtggaagcctatcagagctgtcttcccaagctccagctttatggtcccaccaacatcgctcccatcattcagaaggttgccaagtcagcctcagaggagacaaacaccaaggaagcatcggtaaggagagagacaggattcaccttgcttcttttgattattggtcatactgcccattttagcctgacagtcaattctagttttcctaaatggcttaacttctctatcttcacagtctctttattggaggaaacatgacgttaattaaactctcttctgctgggatgtgaagcttagggtggacacaaatgtcaagtgtctgcctctttgcctgaacacagacactcactagcagaagctactatgttcactgcgttgtgacaatgctcaactcctggccttcctggtctctacactaccatcatgcaacgagctgcttaggctataaccctgaagtaatccgagttccttgacttatgttgtgtttttttcttttcatttcttcttgctgaatgacacacagccttaaccagtttaaagccacaacaaacattcattgtctctgtgaaccagagactcaagcacagctggcctgtgtggactgggcttaggtctcccaaggtttcagctaagatactggccaggagtgaggtcctttgaagagtggcctgaagttgaatgctctgctaatagatggcttagtcccattcctaccatgtggttgctggtctctggtcagagacctcatttcctcattgcttgggataactactaaagaaagtttcccatggcatagcatctggccccacccaggtgatccaagagaagacaaaggagtaactgtgcctcataacttaccacagaagactcacttcatcatctcatgataccctgataatcacacagactagccaactcagtatgaaaaaagaacacacaaggacattaactaggaagtaagagtggctggctgccatcttgaaattctgttaacaccccttccccatccaattgatcagcaagttatgatgctagtctatcttcaaactatatcccatgtgttaccacctctgaataccttcatggacactgttcagggccaacaactgttttcacttacatcaaagcaaattctatgtagaatctgtacttcatctttccccatgaagtgtatcatgcttcatgcagaaaacagactcatcttttggaaacataaataagatattggcagtgaaactcagtggacagagtgcttagcttgcacaaacaaaaccccgagcttaatccctagtaccccatgatgtaggtatgatggtggacacgcataagatcagcatccaggaagtggagacaggagaattagaaaggtatgctcatcctcagctctatactctgttcaaggccatcatgaaatagataaggtagctaagatagattttttaaaaaatgaaaccaaaaccacattctttataaaatcaggcaaggggaaactgagaaaacctgtcccttttcctttgttgacaagagtatctgtgatatctttggcgtttcctgcagcttaatatccttctaggataccaggacctacacaagtaaagggagaatagcaaagacacgggtgtggattctgtgcgattacaagccaacaatgtggtgatggccatcactaacaactccaggaccagatgagtctgctcttgcagagaccgcatagtccaaaggcagaactgcatgtaataaagcaaccataaacaaagtatcagataaataagacctcctggcaacgtggggaatttacgttctctctagaagttcctcccattgttggacactgtgagctagggtcccttgttagcactaggaaagggcattagtttaagcccctcagacaagctgtgtcagaggatcttgcaacaggatttttctctttgataattatagaattcttctaggggtataaatgccccatagacctgatcacacatgagcactttcctaagctgaccttggaatgagctgttattactgctttatttgggaatttccatctggtttgctacaatagtctgtagcttgttaaagttagtacactaaacctggaagaaacaggttctagaatagtcacacttccttgactccaaagagctcttttgttgttgttgttgttgtgagttagcatgtttatgttcattcttactcatgtattagtctttgtaatgctgaggacaaaacccaggacttcctgtgcctgacaagtgttccaccagagctatacctccgctcagaatgtcttaggctcccacacttacttcctgcaaccatcaggcatatttctggaactgcatggaaagtcctcttaggtttgacctgtgtttaatctccctaaacctctttcaacccatgtcacagtggagctagcgtagcgtgctcttgatgggcaacacttgctctcagttgcaatggctcttcctgcactgacaggtttaagagtctttactccaatccccatctcagccccgtggcagcctctccacagggagagggaagaggaaggctgaaaaccaagagccaggacagttttcacatgtgtgctgagagaaccatcataatgacccttaaccagtcatctcctagcagggagttccaccatcataatccaaagggaatacagtaaaagtcctagagactattttaaattctgaggtaaccagatttacaaagtaaaaagaaacaaggagacctattttaataccctttactactaataaaatcccaactagccaacatattggctcattagcatctgattcgtataaaaattatacaaatatgagacattctgggaatttttgtactaagactttaaaatgtttgtgtattttacatttaatgacatctcagttttgggtgctgagttatgacaaacatttggtctttatttagatattataagttgatagatgaaaatatcatacatttaatttggtttgttctaaatttacttttaaaatgttcaataactgaaatgggtctatttttttatttaaaattcaactcctcttttactctagccacatttgaaatgctcaatattttcatgaggttactagctattacacaagacagcacagccctagattttcaaaggtcttcaagctgaaggagatcatataatggtcttgtccctctcagcttttaagaaataaggtatctgagaccaaggcacaaagaggtatttcagacatcacagaacaaagcttggaatccagtactcctgactcccaggcgcctgcttcctacctatcttgagctttataatagtcaataagattatttttatgatgatgatgctacaattattgtggctccattcatcatgaccttaaggctttagagctaccctacataggcttaacatatgtctgttgttgacatgaagccgagatcagatagggcagagctaagaacccaaaaagatacagaggcaacacaggttttgaggtctctctaaagtcaattggaagacagagggcaaacaaataggctggaaggatgggagattgtctagaaggtagacgctggaagactcaatgtcctaagtgtgctagtgatgatgaccagctttggtgaggctgtgagctgacatgaagctgaggcgagggtttacagaagtggagaaggacggacattgatggtctaggagcagagatacaacagtcatctaaagtcaaggccaacattgcatttgggatagtcaccatggtggtagataagagcaaacaagaagcattaaaggagccagaacttttgggattggtggagggtatctacttggaatctaatttggagacaatttgtggggaaaaaaacctgtaccggaaacatgagtgaccagagaatgtttcttgagaccataggttttagtttaaggcagaaattgaaatcacggggagaagcttttctacagcaaaacacaaataccccgtggctttgttcagtaggttatacattttagtttcacatataggatattgttttattagtaaaattttcatctttgtgcatattgcatatggaaatgctgtgatacacagaatatgattcaaaaaatagtacaaagtcagcaggtaaggccaataaataaagcaaggttgaccatatgttgataattgttgatgccaagtaatgaccccacagaggtgcccaggctattttggttttgctctggaatttccttaataaaaagttgaagaaataaacaaaaacgtctattgtccccgctgttgtggtcgttctgcaaggagaccacctagatatagatacctaactaatagtgtattgcatttttctctcccacctgccacctgacttctgactccagcaatacttcatcctgctgatcctgacagacggggtcatcacagacatggctgacacccgggaggccatcgtccacgcctcccacctccccatgtcagtcatcatcgttggggtggggaacgctgacttcagtgacatgcagatgctggacggtgacgacggaattctaaggtcacccaagggagagcctgtccttcgagacatcgtccagtttgtgcccttccggaacttcaaacacgtatgcatagatatcacgggggcatcctcacatctcccatatgtctgtcaatgttgtttgtgatctgttgttcttaaagcagcatcagcagcccctatctaggctgaacaaatcctataggaaggatatacaaatcataactatttggggaagaaagcaaatattgagttacaaatatagtcatggtaaatatagttaccaaaattttgaaaatgcttgcctttgctcatgaagtttagggttgttgtttccttcaggggtgttctaaaaagctgggcagcttattgattactcaaggatacctgggaaagaagcaaggatgagctgaaattcagcctggccctgccaacagaagattatctctgcttggcaaaagtcatgagcaaaatgataagacacttaagccatctcagtatagtgaatgacattggcaatttagtctgctcactcaggagcaagatgattgagctagtacaaatgaatgtggaagtagtttagtgtggtcagagatgggagaaaatgctggaataagctcatcaaagcggactggtccgtggccaagaacatacaaacccataatctttaaatcacttctctgccggacgaaagtcacctgtattctattggtctgtgcagtcgtgagccattatccatagtaagtaatgaagcggagttgtgcttcctggttggctggagcaagcaaacactcaagataattgcctagtatgatattgagaagattctcataacactcttagttctggggataatcactaagcccatagagtcagaagtagattgagattgccacaaaccccaccccaacacagattgtgatatccaacattaagactttcttgggttcatttaaggcctttcagagatgcccaggatatgtctgggagaccattgacgtatagtaggtagacatatagactgcaaatgactgtattctttagtttgcaggcccttgtaagcatcattgaacaacagagcacatctatagcccttgctctccactaaagccctggattctcttctgctgctgttgccactattgagggtggggaggggtgtctaaacatgagctcctagcagaaggaaatgtgcaagtcttcagtgtcctttgctttgtctcctcagtacaggttaccatgaatgcacaaatgcatgtttccttctggaaagagccctgttagcttctacggcagctcctccctatgtgggtagggctccattgctcttgagatacaagagagggaggcatggtgccatgcaatccagtgcaggcttttccacagctctgtgtaatccaatgcaggctctctccactagctgcatagttggaaaagccagtttgctccaaagactctccctcaagtgaacttccaacattcttcacagccaacttactggttgtgtccaagaacatcaaatccaatttgggcttaccctgggacctagccacactaagtagtgacaatctcagcaacagagctattctcagttgtcctattttctgcatgtgctctccaggcatggctccctgcacctctgtctttctgtgacaggcagaatgacagtgtcattctcttctagcaccagccaaatagcctcagctgaaccttcggtcctatgacctgtccaacttctaaaagaagagactgtacactccaggcctccccaagtctcttccttgccatactgccacgtgatcactcttctctttttaaagagggcctcagtgtaattaaaatcatcaagcaagcaggaaatcaatccgctgctgcagatctgagtgtagagggcattttcaagtggcaggggaagctgatctcaccatgagatctaaggtcagtgctataggaaagaataactgcccagcatcccatcttccactttcccatggagagagtttctaaagaaaggtatctgaggctcgtccaaaatttcaagttgtctgctacagacagcaaagtatggcatcaaaaaggtctagcattgttcacatggaagggtatcctggggccgactcaatctgctgcagctatgtcacatggcattcttcttcctaacacccctaggggagagggaaggctgatctcacagggtttgctggtcttccatcagccatgccaaatcccatggggctgaagcactggggttctttgcatggccacacccatgccaacaatgcacattgactcaggactttacatactcaggttccgctgctctgcacccactgggacccaagtgagataagaaagcatgagtccaggttttggagaattttctggagacttgcaaaaaatccatatgctaagcagcccatgggtggataataacctacagttattcccagcgtgtatgtgtgtatagtatgtgatgtatatttgtatgtatgtgtacatatgtgcatgtgtgtaggttggtatgcctgtgtctatggaggccagtcactgacattaggaatcttcttctatcactttccaccttaatttttgagagagtctctgactgaacccaagcttatttgccaagctggtcaaggagctccaagaatctgcatatctccctccccacccagcacaccacagcccagcattgcaattacaggtgcacaggaatgcattccgcactatttacatgagggctggggatacaaatgcaggtccctgtgctggcctggcaagcacgttgttgactgagacatccctccagctctgtgtccaacgttctgacattgcagcatgatatagagtttatgtctgagaaccatgcagtggaattccaaaaactgcaaaggaaaccctcatgatttgaagtttattaccttagcttgattgccttcatccccaccctcagctacatgcagctacacgtcgctgctgtgacctgcagctcgcgggtcctatacccctgaaatgacttcagagcagagacagacccccagacaacaccttccagtttaagctaggcattgacaaaaaaaaaaaaaaatggaagattgttgacaagaactaaagggggactggaaacaaaagaattgtcccaagggagaactgccccaagcaggacaaggacacggtgcccatcttatactctgcgctgtatgtgcatttgcagtctccctggggtgacacaggcagagtgacaggaggattttcacctaccttatcttcatgggtttcaaattagattttgaaaaacatttcattatccaaactaatctactcagaattcaataagccataaataaaagggaggcgaggagctgatatttcatagacaccagtaacccatgagttgcctttcttttgttgctctgtgtgctaacatggtgcgttaaagtgcatagggacaggctctgaactatgtggttctgggcagattgcttaacttctcagtgacacagacttttagtgagatgaggcaaatgctacagatgcattggatggtagaaggtggagtttcttctgtacaatggttagtgtatactgcccatattactgctattaattgccaactgactttgtggttttgccttttttttctatccaactcatgttcctacaacaagcacccatgccagcacagatatacaaggagctccattaggcccagagctttccaatgagctagccactaaccacaagtggatctttgcattcagattcattaaaattagagctggagaaatgacacagtctgtaaagtgcttgttgtgcaaatgttaggacctagttcaatctctagcactcatgtacatgtatttagggcagagcacacaggactggggagctccctggagaaaaccatccctctcaacagccatcaatgtccagtagtttttcatccagggacagggtcttctgagattccacctatctgcactggcatgtcaactggtgttattcatcagctcttgtttaggtgaccatattgttgagctctaaggagtacagctcccctctcatgtatgaacgacactatctcagcagacctcctggtcatctgtctcttataatctgaccacccctcttctgagatctgggtgtagggattgtgttgtgattacatcaactggggctggcctttgactgtactttgcattttgaccagttatgactagaaagcaactgtcacagaaggttacaggggaaaaaaatgtctttgatgaggagtgagcaaacctattcatatgaagctaaatattaacaatgatggctcagatcactcctttcttggttaattccagggtgtggaaatcagtgctgtatggcctcctttcatgggtcttcatgatgataatagggaagtctgtttccaagaattatcattctcattgaagggaaaaaagaaaaggaagaggaaaacagagacaactaagtctgttcccctgaatcaggaagaaaggagttctaaaattcatctatgaaaaatcctcttatatctcataggccaaattaggtcatgtggcatcaatccctagatgtagaaaaagctgggaaaccaagttgggttttggccttctaaactttgtaatcaaggaaaggatggagatgaattctgctcctgcctccatgcctgtgtgaccattagaaaccaaaactcttcatgatgcttctgggcttctcagctaccaggttttttcattcgtttgtttgttttgttgggttttttcatactccattagacagcatggcttctgtttccttcttattttgcttctgagatcagagctaggtgttgaatagtttaagaaagagaagattagaagcacagtccctaggccagctctcctttcttgacagtctcaaatatttgttaaatggtcactctgccaaccttccaattccttcgatagctaacatggtggctcagaccattgaaacaaattgaacaggggttatgaagtcaataccaagggtcagatccaagagtcaggccagctatctatgaccctagagtccactatgctcttgacctcaatcattctctgctacagaatcaatactataagggcattcaagatcctcaccacaatctcactttctaattgaatgactacccaaaccgagtccctactaccactaccacaaccaccaccaccaccaccaccaccaccaccaccacaatcaccttcacaatccaccccaccttccaccaccacccctcacataggaaggagcattctttcttcagatgaatttcttcattagatactttgctgtctctagaatcctcaaatcccacacccgactccccaaaatgttaaatacgtgtccaagttaaatattggaggcatgctggcatttcttctgtgatgacttggtctcacagtgtttgtgactttctataacagcacatctcagatttcagtaggaatcactagagcattgtgttagaaatacagatccccatccaggggcatctgactgtttggaagtgtctgatgcgataacactggtgggcagcctgtacaacctgacacctcatagaagggttgaacttggccatgccaagtcaccttcacacgacttttactcattccagagttccaccacttctggcatagcaaccggaacataggtatctaaaaatgaatgcaaattttaaaacaaagcaaaaccctgcaggacagttcatcctcagatgtgggtttacatttgcagacacagagcgtgaacactgagtgggtgatggttggatgactgagggaaggaagctggccactcagggcagggctcagatctttgcatctgtgtctcatccgcttcaaatgatggttgtttctttttccctgcaggcatcgccagctgcccttgccaagagtgtgttggctgaagtcccaaatcaagtcgtagactattacaatggtaaagggattaaaccaaagtgctcatcggaagtatatgaatcgtcccggacactggcaccgtgaactacacttttacagaattctgaagcactgtttatctattcctgtactttaaataacaacaaaaacaaacaaaaaaaacccaataatatacatttaaagatagcacgttttggtgatttttaattaactgactttttattttattttattttttgcatgtgtagcccaaggcctggatctgttaaacccttgaattgttaaagactttttacaatgaaatacagttataacatactctttacagcatgtcgccttggaattaaaatggtatatgtatccatttttataccggtttgttgaaattttgctaaatttcttattatctttacactgtaaagcattttgaaacatttcgtgaatgtcgatagccaaaacgtatatttggcttaatctcctataggatgagagatttttcaaaatggcagatgcatggactgtattttgcatgtttaaaataattataataaaaataaccttacactgtttttgcagttgttatctataatctctccctgctgagaatggtctctctctactaaataaatttatgtacctagaggtagtcttttttgaagcgggcttgggttatttatcccagtacccatctttacacactcccattgacacaaattcctggacaatcttgttctaatgaagctttctaatgcggggcctgaggttctgcacatctcacaaggtcctcaatgatgctagtgcatcccttgcatggcatgaggactaatggggctctgaacttgaggctttcaccacagagatcatgccaaacagaacaactcctagcctgtttgcccatggcacctcttccacccaccaggctccccagtagcttagaggaccagcctgtctccaagatgagactagaaagtaaggagactgattccagaagctgtccacccgacatcccagcctcgctgttttatagccccgcctcttcctcatccggactgaggagcacgccttctggtttgctcctgcttggctaaaaggggcagcacagctccctgcatgggtggttccattttttatgccagttcctagaaattatttcccaagattcctcccttggatctttgagtgggatcctcttcatgccaaatagcaacatggctgtccaactttccgttctaatcgcttggtctttgagctcactgtgggggccttttttgaccgcttttgtatcactcctgagtacaatttccataagcagaagtgccctggaattgtgtagggtggagatattttgtctgaatctaaggaagtctaaaaccaaaataatgacttcctcttctcttatgatattctctccaagaaatggacaaatgttttataagctataaaaggcacaaaatgtaacttatttttggtcagaaaaatagagaagtgtatccaaagcaaaagaaatctgttgttggggtagtttgggttctttttctttttttttgaagcggaaacaataataattaattaagcaaatcaaatgtcttgtacgatttccagagttataattatagattatcttgcaaatacatgtcaaccaaatgcataacattttgggaatgatggtttaaaaaatgtacgacagaaaaaaacagtcacaaatgtttaaattgtattgttttctgaataaattgggtactaacagaatctttctaagagttgtgctcttcttcctctttttgaagcaatttcctgtcagtgagttgtgtatgtcacatgcttgaggggccatcaggggacactggtgcttcaccattgcttctaacttgaaatagttaagctctatattacagaaatacctaacgactgtttctaaccccaagccggtgtgtgaacagtcatgtctatgtacctggtatgtaggaagtactcagctagttaggcaatgcagaggtgaacaataacatgaatgaataaacaattagacttatcaatgccgcctctgatctatatatctgacctgtgatagatttaatatgtgggatgagtgtttgtgactgtccttaagtggcggcgtgccatgttgtcccatgatatcctccaatatctcctgggatgtcttcactcagtgtagactccctgggatgtcgaattagtaaggacagagtccaatttgcctgacagacatttaggaagtttacttccctttacatagccagactcaagttcaggccccttccctgcccccaaatagtaaaaatagtactgaacgatcatttaagggtatctcatcccagatttctacagcaaaataacacacagtagcttgaatagcagaattttatttttcatggtttaggagtctaggaagaccaagatcaaggtgtcagccatttggattctaatgggacctctctttctttctttttttttaaaattaggtatttatttcatttacatttccaatgctatcccaaaagtcctccacatgctcccccacctactcccccacccacccactcccacttcttggccctggcgttcccctgtactgggacatataaagtttacaagaccaatgggcctctctttccactgatggccgactaggccatcttctgatacatatgcagctagagacacgagctccaggggagtactggttagttcattttgttgttccatctatagggttgcagttccctttagctccttgggtactttctctagctcctccactgggggccctgtgatccatccaatagctgactgtgagcatccacttctgtgtttgctaggccccggcatagcctcacaagagacagctatatcagggtcctttcagcaaaatcttgctagtgtgtgcaatggtgtcagcgtttggaggctgattatgggatggatccccggatatggcagtctctagatggtccatcctttcatctcagctccaaactttgtctctgtaactctctttctaactcacagttagacatttaactttgccttagcttccatgatatagaaaaaaaaaaagagttctctgtttttacaagaacactaatccccccacaagaatgtcttcctcattacctagccatctcacaaagcgtctacctgctaatagtatcacagtgggtaccaggtctcccatatgtgaactgtggaagggcacaaacatggtcagtaacaagaggtgactgtgaaactgatgtcactctaagttctttttttttttccttttttttaaaattaggtattttcctcgtttacattttcaatgctatcccaaaggtcccccatacccatcccccaatcccctacccacccactccccccttttggccctggcgttcccctgtactggggcatataaagtttgcaagtccaatgggcctctctttgcagtgatggccgactaggccatcttttgatacgtatgcagctaaagacaagagctcccgggtactggttagttcatattgttgttccacctacagggttgcagttccctatagatccttgggtaatttctctagctcctccataaggggcaatgtgacccatccaatagctgactgtgatcatccacttctgtgtttgctaggccccggaacaagagagagctataactgggtcctttcagtgaaatcttgctagtgtatgcaatggtgtcagcatttggaagctgattatgggatggatccctgcatatggcaatcactagatggtccatcctttcgtcacagctccaaattttgtctctgtaactccttccatgggtgttttgttcccatttctaagaaagggtaaagtgtccacactttggtctttgttcttcttgaatttaatgcgtttggcaagttgtatcttatatcttgggtatcctaagtttctgggctaatatccacttatcagtgagtacatattgtgtgagttcctttgtgattgggttacttcactcaggatgataccctccaggtccatccatttgcctaggaatttcataaattcatttttttaatagctgagtagtattccattgtgtaaatataccacattttctgtatccattcctctgttgaggggcatctgggttctttccagcttctggctattataaacaaggctgctatgaacatagtggagcatgtgttcttcttaccggttaggacatcttctggatatatgcccaggagaggtattgctggatcctccggtagtactatgtccaattttctgagggactgccagactgatttgcagagtggttgtacaagcttgcaatcccaccaacaatggaggagtgttcccctttctccacatcctcgccagcatctgctgtcacctgaatttttgatcttagccattctgactggagtgaagtgggatctcagggttgttttgatttgcatttccctgatgattaaggatgttcttgttgcgtatgactcacttatttctctggagtttcggggatcatagtatcaggttctctatgaggagtggaaattggattttacccacttgccacccatctcccagggcaggcttctcaatccataccttctaaatagagaactcacaggcaaaccctctactgaaactgggtgggacagagtcagcttttcaggccctggtagcaatttggctaaatcttgtcttctggagtgagtgctcagaggagtctggggagccgagccctccatgctgtaagccaactactgttctcttcgacaacagtgctccaaaatcagatataaaagccagacaccattgatgtctttggttctcttcttaaaccttagatattgaaggctgtctctttttttgtgaccagttttagcaggcaaaaagaaaccaaagaaatacatatatgtgtagttcatataagtaacatgtgaacatattttatactcacatgcgcacacacacacttgggggtaggggtaaagggggtatgcaaatctaaagagttatcacgtgaccccaaagaaaggtggcatccacaacacatatacagccagaacaaaaagggcacctgtttaatatctgaatattccttactaatttgtttggcagaggggaagctatccccaggtctctgcccttgtcagctaagcagactgatatcagttaaaaacagtttttgctctaagttgagccccacccccttttaactgaaatcagctggcttctggcagtcacgtgcttctgactacccagaatggaagccttggctttaaggcaaatgtggaagcaaaggatttccaccgacactatgaagtacatagagtcaaaggaagaagtctagcaaagactggaaagacatgtactgcaggcaaaactgaggcagaaaagctccctctgaattcagtgcccacgtggttttcacatggtgctctaaaacagcaaaacaaggcaaaactgttcccttgattgacaggcagcagcacaatgaggaaaaattttagtgaaatgagatagatcaaaaaagaatgagcaagaactcaggaaaaacaaggttttagggagaaatagcttaaatggaggaatgctgtcactagattggaaatgtccatggcttccttagtgaagcaagaatctgaatggctactctggatcctgaatccaaattcacgtagaaatctccatctctaccctcttggcactgtactcagccatgcttatattaataacagacccttaggaaatctgtaagaaagtgggttaaattgcttgtcatgcatcaaagcctcgaattcaaatccacagaacctaattgaagtgatacatgacagcttgtgtctgtaatcatgacacttctactgtgacatggaaggtggagacaagagactcctgggggttcacagtctagctatcctgctttacacatcagcaaactctggaagacagcctctgagtagaagatgatgacggacatccagaattgtctccaatgttgtgtgcacacacctgcattcatcgatacaaacatatatacgtacacatgcacacgccaaacacacacacaaagacctttgcccccaattttggaacatctctctcatctgaggattgccatcttcctctcatgggctcttctctttcccccagcatgggagcagcagatcctcaggacactgccaggtctttccaccatctaggcacatatagaccacatatagacacatataagggtaccatatagaccagacactacatatgtggatgcttcagggatctgagcaagccatatgagtaatgcaggaccagagggtaggaacggagggccaagggaaagcctgtgcccaaaagacggcagccacagctcaggggaccaagcagaaatgtggacccagtgcagactgtctatcttcttttcagcaaaatcgtaaactctgtggctttgcatgaaacccgttaatattacctattagaaacaggataggagtcaaacaatgccagtcaaaagagaactaacactaggtttaagttgactctgggggctagtatgacaacaaggggtcatctggcctcctccccatcgggtctcatgactctcgaagactactagtgttcttttctgagtttgtgtctcttgatatttgtattagaaagagaaactggaagtcaagcatggcgctgcccacttgtctagagacagacccatgaagcctatctagcaagttggagattagtctgtgttacatgagagctttgtgtcagaagaagggggaagttgaaattgaaaatgtagtaagtaacaaaagtcaactcattatatctttttttaaaatttttttagtgtggaatagagtttatttagggcatggggaggggaattaagagagtattagaggcaaagaaaggcagagagaaggagagagtagagaagtagaggctggccatggccacatggagagagggggaaagggaattcagagagaagggacacaagggggaaagaggcaagaaagcatcaagagtgtaagagggtaagagcaactcattatgtcttatcagcaataaatacttaagagactgaagagatgggtcagtggttaaagagtaaagcaagggccatgtaagtttgaggaccagagttcagatccccagaaccaatatcaatgccaggtagacatgacaccccacctgtatctctactctctgaaagtggagaagagagatcccccgagcaggctggctagtgagactagccatattgggtttgatggcgaaactctgcctcaaagaacaggatgggagggctatcaagagtgatgcctagctagcatcgacctcagctttccacaagcatgctcacacacatgttgtgagcaccccccaaacacacacacacacacacacacatacacatgcccacacacatgcaacacacatacacataaaaatggaaaaagaaataaatattataattttattttaaaactattttcaaaagataagaggaattagactgatagtcttcaaatttggcaaatcttcagtgatgttctcatttctactttgcattcaacctcttgttgggtttttgttgttgttgttgttgttgttgttgttgttttatatttataagcacatattagtggaacatatttatatggtgcagggagatgtttcaatacatttttctatgattaaatcatggtaaatgttgttccaggaagcatttgtgaaccccaaagaccaccaaggagccatctctgatgtaatagcattagggtctctattacaagctcaggcttgtgctctcctccaactcaaccctgacacagcagaataggaagggaaggcagagcagccttgaacactcagcagaacaaggttgtatagggaatgggagcaagtgagggggtgtccatcctgccaagcatctaactggatgtctattgtaagcagacaggtgggtgctctgaagcaagaacatgaactaattacatctgaaagagtcagactaatctgttgctagaaagtagctatggagtaactctttggtatagaccaaggacaagtcatggggtccttcctggtagttaggtgcagcttgggttctgttgcaggtcaagttctcagggtttttaatttttctttaagatggaggccagtcccaagatggtataggtttggcctctcatgatgagcatatccatcactttcaatggttattctgtactgcaataattcagtcaaaaattttaattctattctttgaggtaagataggtgaaccctgaggacactgtgttaactgacataggccaggcacagaaagacaagggctacatgatctccagtgactgtggagtctaacacaggcggtcttccagaaggaaggaatagaacgtgattacccaaagctggggctgtagaaaggtgtagcagataggatagacagcaagagacatgatgctctgtgtgaactccaacactgaaagtcacaaaccacgtgtgtctcgggctttctagtgctgtgacagaacaccatgaccagaagcaacttggaaaggaacaggtttatttcagatgataatcctcaagtcacactcttcactgagagaagttggtgtagaaacttctggcaggaacctggaggcaggaactgaggtagagaccatggaggaatgctgttttctggcttgttctctgtgacttgcccagcctgctttcttatagaacccaggaacatctctccaggggtggcactgtcctcatgcttgcccacatcagtcatgaaccaagaaaatgcccccaaagagtgcctgaaaggtgagtcagtctggtgaaggcaatttcttaactgatggtcctatttttagcttttggttgtaatcaatcacattatgtttccatctcattcaaagtcaatccagcgcaggattgtaaatgtcgaacaggagatcatagcaataaaatttacctggcatttgtcaatagcttctttgcttatgaaggattttgtaatgtcatgcattggtaatctagaaaatgttagttcactcagatgtatcagatagtctaaacgcttacacagttgatttaacaacatcaaaacatcgcatgacctactgctgtctaatagcactttatctcatcaagaaagtattgagaatctgtcaaatattggcagcacatttaatttttttaaatcctaatccttgctagaaagctcaaatgttaccattggcaataagccctgtcggatgttcttcttggagcgacaggctcacttcactcaacttcaagaaaaatgtatccaaacattcatgtctggataatctgtcaatccttcttttaaaaatgttttttggaagagtgatgttctgtgggggaaatccactatcccaatcccaatacaatcgtgggcttacttttcctgtggggatcgttttaggtagaaatgaaatccaagtacttatgtgtgttttgcaatttatcaccaagcctattaaatggacatggacttgggaacaccaatacttaaagaaattgttgtgtgagaagatgtttcctgggtaaatgcttcacagatccacttataccaaacagggagcctatgagagaccaacatgtagataccacacaagtctgacttggtgaaccgtgagttttcctgaggttactgatgggaatatgagcaagagattatttgcaggagcagaaatgactcaaagatatctgcaccaccaaaacccaccccagcatggtgacagctcacagacgctgggaacctggagaacaccggtggcaaagcctgtaggcagctcaataggttagagagtgtcctttccaagggatttaggacacctcttctgggcagctcttaggcatatgccccacctacctcttgtgtgtgaaggtcacagcaaagcatcagagcttgtagggaaatgatgcacacaaggtaaaatgaaaactagaaactcttagttgggctggttcaacctgctagagtctgacaccagatggttcatgttagacatattttaagtacactattactttggggtaaaagtttcctggtaataattatcaatcttacctgcacaataaggcttaaggtgtgtgaacacattgaaactcttctgcaaaatgcatgagacagagaagatgtgttccatagtttaaggacctaggatctgatgtgctctctgagcgagatagtgtagtagtcagcaggctatgaagtacaggtgacatctcccctaagggtgagttatattgactataagacaaagataaagatctagggagggagagtctgggatacacattctgagggatttgggtgaagtctggtcctacagatagcaaaggtcaccaggtcattaaaaaatccacttccaccttctgagtggaaaacagctatacatttcctccattgaggagacagccctgatgactaatggggtggtttctccagtacttaactgtgaacacctgtgtcctctacacttgggtgcctgccccacctaccccttggttatgtgatgctgttattttcttagcaaaccccatttatgtgacccttctgaaattctttcctgtggtacactgtccttgctacacctgagtgaagtctcggaggagaaaagggtgtctccttggtatgtttaatgatagggccagattctgttttcctagcttgtctgtgacaggatgcttacctgagcttccttcaaaacctaggatagatgaaaaaatatgatacatcaaaataacgttaaaactggacactgtgcttattgtaaatagttatggttcgttaagtgcactgtcagtaaatcctgggagaaaagtaaaatttacataaaacctttacttatttatcttatattttctgataacatacatttatccccaaaattctagcctcctgtgtcagtgtcaaaatgaattttattagtcagcattctctagagtcgtagaacttatggaagaatttctctatatattaagggagtttattgtgatgacttacagtctatagtccaactaaacacaacaatgggcagctgtggatgggaattcaaaaaatctagtagttgctcagtcccacaggctagatgtctcagctggtcttctgtagaagtaggttccaacagatgtgctggcaggtaagtgcaagcagttgaagaagagtgaatcttccttcttccaacgtctttatgtaggtccccagtagaaggtgtggcccagattaatgtgtgtaccaccacacctgaatcagggacttgttttgtcccaggctgatcttgaactcagagatctccttgtctcagtctcctggaattaaaggagcgtgcatactaccttccctgggcctaagctttccatagccactgtgcctcaaaaatctccatgtcaagattcaggtcaaaaacttgtgtcttccaacctcaagttctcgatcacaggtgtgccttccaactctggattggagttcgttccagacatagtcaagatgacaaccaggaatagccaccacatgaacctaagtgggttttgtaaagaacattttctctttttttatgcataggcgtgttttgcttgagtgtttgtaagtgcattcatatactgtggttggtgcaggcaccacgtgggtgctgggaattgaacctgcatcctttgaaagaatatgtgttcttaactgctgagccatttctccattccacaccctctccaacc

SEQ ID NO: 2 - DNA, 3107 bp, Mus musculus
ctttcaggtggacaggacggaggtgattcgtacctgcataaacccagtgtactcaaagctgtttacagtggacttttattttgaagaggtccaacgtctccggtttgaagttcatgacatcagcagcaaccacaatggactgaaggaggctgacttccttggtggcatggagtgcacacttggccagattgtctcacagagaaagctctccaagtccttgctgaagcatgggaacacagcagggaaatcctccatcacggtgattgctgaagaattatcgggcaatgacgactatgttgagcttgcattcaatgcacggaaattggatgataaggatttcttcagtaaatcagacccatttctggaaattttcagaatgaacgatgacgcgactcaacagcttgtgcatcgaacagaggttgtgatgaataacttaagcccagcctggaagtcattcaaagtatcggtaaactctctatgcagtggagatccagaccgcaggctgaagtgcatagtgtgggactgggactccaacggcaagcatgacttcatcggagagttcacctccaccttcaaggagatgagaggagccatggaagggaaacaggtacagtgggaatgcatcaaccccaagtacaaagccaagaagaaaaattacaagaactcaggcatggtgattctaaaccagtgcaaggtagctatagacttcactgcctctaatggggaccccagaaacagctgttccctgcattatatccacccttaccagcctaatgagtacctaaaggccttggtggctgtgggagagatttgccaagactatgacagtgacaaaatgttcccagcttttgggtttggcgccaggatacccccggaatacacggtctctcatgactttgcaatcaactttaatgaagacaacccggagtgtgcaggaattcaaggagtcgtggaagcctatcagagctgtcttcccaagctccagctttatggtcccaccaacatcgctcccatcattcagaaggttgccaagtcagcctcagaggagacaaacaccaaggaagcatcgcaatacttcatcctgctgatcctgacagacggggtcatcacagacatggctgacacccgggaggccatcgtccacgcctcccacctccccatgtcagtcatcatcgttggggtggggaacgctgacttcagtgacatgcagatgctggacggtgacgacggaattctaaggtcacccaagggagagcctgtccttcgagacatcgtccagtttgtgcccttccggaacttcaaacacgcatcgccagctgcccttgccaagagtgtgttggctgaagtcccaaatcaagtcgtagactattacaatggtaaagggattaaaccaaagtgctcatcggaagtatatgaatcgtcccggacactggcaccgtgaactacacttttacagaattctgaagcactgtttatctattcctgtactttaaataacaacaaaaacaaacaaaaaaaacccaataatatacatttaaagatagcacgttttggtgatttttaattaactgactttttattttattttattttttgcatgtgtagcccaaggcctggatctgttaaacccttgaattgttaaagactttttacaatgaaatacagttataacatactctttacagcatgtcgccttggaattaaaatggtatatgtatccatttttataccggtttgttgaaattttgctaaatttcttattatctttacactgtaaagcattttgaaacatttcgtgaatgtcgatagccaaaacgtatatttggcttaatctcctataggatgagagatttttcaaaatggcagatgcatggactgtattttgcatgtttaaaataattataataaaaataaccttacactgtttttgcagttgttatctataatctctccctgctgagaatggtctctctctactaaataaatttatgtacctagaggtagtcttttttgaagcgggcttgggttatttatcccagtacccatctttacacactcccattgacacaaattcctggacaatcttgttctaatgaagctttctaatgcggggcctgaggttctgcacatctcacaaggtcctcaatgatgctagtgcatcccttgcatggcatgaggactaatggggctctgaacttgaggctttcaccacagagatcatgccaaacagaacaactcctagcctgtttgcccatggcacctcttccacccaccaggctccccagtagcttagaggaccagcctgtctccaagatgagactagaaagtaaggagactgattccagaagctgtccacccgacatcccagcctcgctgttttatagccccgcctcttcctcatccggactgaggagcacgccttctggtttgctcctgcttggctaaaaggggcagcacagctccctgcatgggtggttccattttttatgccagttcctagaaattatttcccaagattcctcccttggatctttgagtgggatcctcttcatgccaaatagcaacatggctgtccaactttccgttctaatcgcttggtctttgagctcactgtgggggccttttttgaccgcttttgtatcactcctgagtacaatttccataagcagaagtgccctggaattgtgtagggtggagatattttgtctgaatctaaggaagtctaaaaccaaaataatgacttcctcttctcttatgatattctctccaagaaatggacaaatgttttataagctataaaaggcacaaaatgtaacttatttttggtcagaaaaatagagaagtgtatccaaagcaaaagaaatctgttgttggggtagtttgggttctttttctttttttttgaagcggaaacaataataattaattaagcaaatcaaatgtcttgtacgatttccagagttataattatagattatcttgcaaatacatgtcaaccaaatgcataacattttgggaatgatggtttaaaaaatgtacgacagaaaaaaacagtcacaaatgtttaaattgtattgttttctgaataaattgggtactaacagaat

SEQ ID NO: 3 - protein, 473 aa, Mus musculus
FQVDRTEVIRTCINPVYSKLFTVDFYFEEVQRLRFEVHDISSNHNGLKEADFLGGMECTLGQIVSQRKLSKSLLKHGNTAGKSSITVIAEELSGNDDYVELAFNARKLDDKDFFSKSDPFLEIFRMNDDATQQLVHRTEVVMNNLSPAWKSFKVSVNSLCSGDPDRRLKCIVWDWDSNGKHDFIGEFTSTFKEMRGAMEGKQVQWECINPKYKAKKKNYKNSGMVILNQCKVAIDFTNGDPRNSCSLHYIHPYQPNEYLKALVAVGEICQDYDSDKMFPAFGFGARIPPEYTVSHDFAINFNEDNPECAGIQGVVEAYQSCLPKLQLYGPTNIAPIIQKVAKSASEETNTKEASQYFILLILTDGVITDMADTREAIVHASHLPMSVIIVGVGNADFSDMQMLDGDDGILRSPKGEPVLRDIVQFVPFRNFKHDAAKSVLAEVPNQVVDYYNGKGIKPKCSSEVYESSRTLAP

SEQ ID NO: 4 - DNA, 209484 bp, Homo sapiens
  misc_feature (1)...(209484): n = A,T,C or G
cttcactatttttaaacatcaattaataagaaaaccaaggctctccatcctcgggtgacctctctggaggactccacagctgtaacagagaaatgagatggtgggaacatcctgttaataaccaacatctgagtgaagtgaaaattgctttacacttgtgtgggattagactcctagcttctataaactgaggatctgacagtcactgcaagttcgagtgactgcaatccaacaccttcctgctcccaatcttggcaggctctgcctgcttttagcaggcaggcatgaattttgtgaggcagtttctgattgcttgatatttatgtgccagcttacagctggagttggggggtatacggcagttgatttaggactgaaaaacatcttctatgttatagaatcatatcttgtcctctggcctggaacattttgatttctcatgagatattctaggggggctttagccaagtggaaggaacttaaagagcaaaatataacaagaggaggaagagaaagtttgaagattggtaaacactgtgctggacactcaacagtcacactgaagagacttttcagggtttgttgcccagacgatggtgtttggagcattgagcattctgaatggccccacttgaaaaattgctgtggtcagatggtacctgaatatatttgtcttcttcaagagaggtgctatgtcatgggaaacagctttaagggaaatctcaagtagttccatcactcgacagctgggtgaccttaggcaagttaacctttttggttctaagtttcctcatgtgtaaaacagtaagtcataatatatagttgttgggatgattaagtggaataaggtatgtaaagtggtttaaataattcttggtgcatacccattgctcagtaaatgctccttatgatccattgttgagtaacattgggaaatatggtgttgtcactaacaggaagttaccacaaaaatcacatatggattacaagttttcaaagttttaaaagcccataattcattaatcatgaaccatcagaatggacacaatttcacctgcccttgagatttagaagctcttccaggttctgtaatatcttgaaacatttttaagagcattaaggaatcaatcaaagttccagcagaaaaagagatgttcatgaagggaccgcttcaagatgtgtgggcaaggttaaaggaaccagcaagagactctgagatgccctgggactagcaatagtcagaagctactattagagggacttggtgggcagacagcggtggcagtgttactggaacccagggagagctggagctttgcaggaagggcggctaggagggcctgtagacagagggtacaccatgggttcctcctgtcttctagtctcctactggtgctttccattggctgaaagaaggtgagctgggccaagaaacctgaatgaaacaatccacatgtgggctggtctcctggtacatagcagagcagaaagacctggggatgtaaaggagaatggataccatattcactaactcttgtttcacaaatagggagtgtgccagttaatggagtgcttgattggataaaacatccaaataaaccaactttgcccataatacgattatttctttcattcattccttatgtcctatagtgacataagcagcagtcaaaatggcagctttcaaagaagcaggaaagtattagcatataaggtctgatccagaggttggggtgtggtattcagagtagatcacacactagccctggttcctggttgtcatccactttggagctgagccataacagttggaatatagtattattggttctacaacttaactgtgcattggaatcacctgggtagatttttaaattgctgatgcattggttccccgccacccccacacagtttccaaattaattggtttggagatccccaggtggtttcgatgcaagaaaagtttgagaattactagtatatatgttgacatcacctgggaatctccaggccaattaaatgtgtgtgtactatacaggatttcactaaactacagcaagatagagctggcacaggctagaacagtactgtccccatgtggctatttaaatttaaatttaaaattccattcttcagtcccactagccacatttcaagtgctgaatacctacatgtggctagtttggaccatgaagaacatcatggaaagttctatcacacagcactaggacagtgacaaacccctcaagctgagtggactggggcaaaagacaatgaggcatacaaaccgagaaatcagaaaacagcctcacaaactggacactcacactggggaaaaggaacagctatagaggacacgcagcatttggcactggaagatgtagctgagatctacgcttctgtggcaaatcaggcaggatttgctcatgctctgtgtggatggagccagcagcttgaaggtactgaggaggccaacgaaggaaggggaagacccagaacatattagcacttgagacctctctgatggtgcctacgggggatactcatttcatttacttctgagccacattcctaagcaaggatgcaaccctgctgtctgctttgaatagcataagtaccaggctatgtctactggtgaaacgaatgtctagctctaggttctccggcatgttcatcccaggggatccataagcagaacccagtgtgccagaggccctgttacttgagaaccaggttaactgcatggcaggaggatgaaggcagggttcaatggattgaaagtgggagaaagacacttgtcatgctggatcactcgttcagtttaatctggagtatttgaaggttttactgcttgatgggtgaagagtgcttttttggagatatatccattaagtggtgctgccagtctggatgtttcttaagtagaatggtgtatttgtttaccagggttgccatagcaaagtaccataaactgggtggcttaaacaacagaaatttattccttcacagttctggaggctagaagtccaagatcaagacatcagaatgtcagcagaactggttctctctggggttactaggaagaaattgcttaatgctcctctcctggcttttggtagttttgctggaaatctttggcatttcttggcttgtgctgaggaacaagagattgcaccactctgctctcttcctttgtgttcacatggcattctccctgtgttcatgtctgtgtcaaaatttcccatttttataaggacattagtcatatcaaatcagaaaccgaccatactccagtatgaccttatcctaagttaattacttctgccacaatcctatttccatatgaagtcacattctaagacactggtatatgaattttgagggataaaactcaacctataacaaatgacatagtataataaaaagagcatatattctagagtgagaaagactggagttgagtcttacctttgccactacttttctgatacacagttttattttatcatttgcaaagttagaatgatatatttaataggatcatttgtaaaattataaatcagtgttaaaatgaaccattatttttatgtttccctaggaaagaaaaaaattgtttccaattatactatgacatatcaattataatatgcatcccaatttcaaagatattccaattaaacaatatatcatcaattacaacatgcatcccaatttcagagatattccaattaaacaatggtatatcattaattataacatgcactccaatttcaaatatattccaattaaacaatggcatataattaaaacacacataccaatttcaaatatatcaaactgtgaaataaaagtatgttttaaagttgatgagggtaaggcttgaagaagataacatgtaagtgccttctgcctgagcagaaaagttaccatcactgtcggtcaccacctaatttgccatccatttcaagaaggaatttaataatttactaggcaggaggcagcttccacccaagttgttaaggagaaacaaaggctgtcaaatactcaggcatttttttagtcctaggaactagtgagcaggaacccctggtccatgtggcagatcagccagacagccagaaatgatgcaacctcagtatgtagacatatcacacagaaatggcacaaatcaattcaagtttccacatgagactttttacacaaccagcaaactgttaaggagttttaatcctaacaaagtagaaaatccatttaaattgaaaattaaaaccatgtctcatcagcaccaacctatctctctctgttgagtgattttgagatctgcaacttgtttgttgcagctacagaacaagccactaactctgaggccagtcacttaaaatcagcagtcacaagcagctgaaatcctgaaattgaataatgctatttctggtggcttggtgattcattttattatctaacttttgtgtggtttaatatgtctccttggaagttacatggtttgaaaaattgcctgtaataaatcctttatttttaaacataaagccattctttattcagagaaaattagtttctccctaccctcactaaataaatattgacaaaatatttaaagaatatcagtttgaaggaatacctaattataagcctgccctgagggcctcttgtctctctctggcctatgatgtcattctttaccaagacctattacccatgggatgataagggcctgaatttctccaggaaaccttagagcattcagtgactgacaataattttggcttttgccttcacctcctccccactgatagcatcacacgatttagctctcacctctcccgcaactttgcctgtggcagttccagcccttggaagtcccagagaatagatggccattgtacaaatagtcttgaattgtttgttgatgacacattgccccgcacacaagccaatttttttttttttttttttttttttgaggctctgttgcccaggctggagtgcagtggcctgatctctgttcactgcaagctccgcctcccgggttcacgccattctcctgcctcagcctcccgagtagctgggactacaggcgcctgccaccacgaccggctaatttttttttttgtaagtagagacggggtttcaccatgttagccaggatggtctccatctcctgacctcgtgatccgcccgcctcggcctcccaaagtgctgggattataggcgtgagccactgcgcccggccacacaatccaatttctatgggcagtgtttagggcccccactgtatctcaaatatgtccagtggataaatcagatctccagagacacaactgcagcctcaatcattgactttccctatcagttccacattttatgtttgtcgtctggatgatgcattactttgagcaacagtgtttatgaaaaaatgcttcaaatttgcataactatatagcatagaggttaaacacacaggttctggagcttaactacataggttcacatcccacctctgctacctacaagttgtgtaaaatcggaaaagttatggcggtctctctatctcccagtaagagaggataataacagtacctacctcatattgttataagaatgaaaacagagtgcttgtcaaaagatttgaaaagctgcttcatcaaagaagatacacaggtggcaagtaagcatacgaaaagagcctcagcatcattagttttaggaaaacgaaaattaaaaccacaatgagagaccactccacacctactagaacttaaaaagttaagcaaaaatctctttcactcctacatatttacccaaaagaagaggaaatacatgcccatacaaaggattgtacatgaatatgtcatgcagttttatatgtaatagccaaaaactgtaaacaattcaaatgtccatctgtaattgactgggggcaataaaaggataaactactgataggaccacatgaataaatctcaaaataattgcgtgaaagattaaagacaataaaagaccacagattatgatatacatttatataatattataaagaatacaaactagactgtagtctcagaaagcagatcagtagtttcttgggaatggaaggagggaaggttgagaggatgaggatacataggagtaagagaaaaatttgggtgcatggatatgctcactctcttgattgtggtgatgttttcacaagtatatatgtgtcaaaacatattgaattgtatactttaaatagatatatactttaaatagatgtggtttattatatgcaaattatgcctcaataatgctgttttttttaaatgagcaccatgatagcaggccttccaaaagtgttagttgttattgactttattattagactgaaaaatgttttagatttttttttcttttttttgagacggagtcttgctctgtcgcccaggctggagtgcagtggcggggtttcaccatgttaggcaggatggtcttgatttcctgactttgtgatccaccctcctcggcctccaaaagtgctgggattacaggcttgagccactgcgcctggccgtgttttagatatttttaaaagcttctcatgagaagcaatattcaatggttgagtctctcaccatcacaccataatctagctgcctttttcctttctaaggatgctcatgaattgaggaaagtagtccagactttgaggtcagaaggcatgagttcaagtgcccactctgacattcaataccttgtgctgatatttaaccttgagttttctcatttgtaaaatagtatacaactatatcacatgatagccataagaatcaaattttaaaaatggatgtgagcatgttctgtaaacaataaagcaatgtgaatttatcagtcatcacgattagggaagagagaagataagcattcacatttttgcagactggataacagagggtaagcaagattaaaataaaacttgacctcacacaagagcatgagatagactctacatctcctcatttcccctaggactgatgttcccacaccagaattctctagaacacttttttagagatttctgggtcctaccatatactcactaaatcagaatgacctggggttaggaaacaggaatctgagttttaaagaaagcccccccgccccccccagttgattaggatgcagctggtagcaccagtaagtgaatgatcttttgggaaaaactgccttgaccctgatgcctctcaatgagaaatgaacaatcctaggccctgttgctcatgtgaaacctggattaggcaccagaaaaaaataatgcatcttccataataactggaaatgcataatattttaaaacatctttcaaatatgcatttattattgcaagcacttcgcttattgtcattttcctgcttttcctgagcagttatattcaggattcttagtggctttctgattatccttggaaatcgtctgtcttgctaatacaaatgtttatcacttaatgtctttccatcttgtcatttcgctcaaaaaaccaagtcactcagtgctggcagcttaccttgtatagtgtgtatgaggtgtgtggcttgatgccaacatgaactttataagggaatgccactggaaaatcaagaagttagaagaaaagtaccagaattggtgcacatcacttatttgtgccctttggggcagttaaaggagaataacaaagactagagtttccatcacctgtcttctatcatctaaacctattcagcactctcttccagcaacaaggagagcaggtgccctttttgtgtcttgaggatgtcaaatgcacccacagcatacttcttggggttatttccaaatcctctatcaaaagatacaatataaatataattaaatctcttatatggctcattatttcatgaatttggaccagatgttgcaaaaaatgcctctaggggccaggaagagaaattaaatgannnnnnnnnnnnnnnnnnnnnnnnnnnnnnnnnnnnnnnnnnnnnnnnnnnnnnnnnnnnnnnnnnnnnnnnnnnnnnnnnnnnnnnnnnnnnnnnnnnnnnnnnnnnnnnnnnnnnnnnnnnnnnnnnnnnnnnnnnnnnnnnnnnnnnnnnnnnnnnnnnnnnnnnnnnnnnnnnnnnnnnnnnnnnnnnnnnnnnnnnnnnnnnnnnnnnnnnnnnnnnnnnnnnnnnnnnnnnnnnnnnnnnnnnnnnnnnnnnnnnnnnnnnnnnnnnnnnnnnnnnnnnnnnnnnnnnnnnnnnnnnnnnnnnnnnnnnnnnnnnnnnnnnnnnnnnnnnnnnnnnnnnnnnnnnnnnnnnnnnnnnnnnnnnnnnnnnnnnnnnnnnnnnnnnnnnnnnnnnnnnnnnnnnnnnnnnnnnnnnnnnnnnnnnnnnnnnnnnnnnnnnnnnnnnnnnnnnnnnnnnnnnnnnnnnnnnnnnnnnnnnnnnnnnnnnnnnnnnnnnnnnnnnnnnnnnnnnnnnnnnnnnnnnnnnnnnnnnnnnnnnnnnnnnnnnnnnnnnnnnnnnnnnnnnnnnnnnnnnnnnnnnnnnnnnnnnnnnnnnnnnnnnnnnnnnnnnnnnnnnnnnnnnnnnnnnnnnnnnnnnnnnnnnnnnnnnnnnnnnnnnnnnnnnnnnnnnnnnnnnnnnnnnnnnnnnnnnnnnnnnnnnnnnnnnnnnnnnnnnnnnnnnnnnnnnnnnnnnnnnnnnnnnnnnnnnnnnnnnnnnnnnnnnnnnnnnnnnnnnnnnnnnnnnnnnnnnnnnnnnnnnnnnnnnnnnnnnnnnnnnnnnnnnnnnnnnnnnnnnnnnnnnnnnnnnnnnnnnnnnnnnnnnnnnnnnnnnnnnnnnnnnnnnnnnnnnnnnnnnnnnnnnnnnnnnnnnnnnnnnnnnnnnnnnnnnnnnnnnnnnnnnnnnnnnnnnnnnnnnnnnnnnnnnnnnnnnnnnnnnnnnnnnnnnnnnnnnnnnnnnnnnnnnnnnnnnnnnnnnnnnnnnnnnnnnnnnnnnnnnnnnnnnnnnnnnnnnnnnnnnnnnnnnnnnnnnnnnnnnnnnnnnnnnnnnnnnnnnnnnnnnnnnnnnnnnnnnnnnnnnnnnnnnnnnnnnnnnnnnnnnnnnnnnnnnnnnnnnnnnnnnnnnnnnnnnnnnnnnnnnnnnnnnnnnnnnnnnnnnnnnnnnnnnnnnnnnnnnnnnnnnnnnnnnnnnnnnnnnnnnnnnnnnnnnnnnnnnnnnnnnnnnnnnnnnnnnnnnnnnnnnnnnnnnnnnnnnnnnnnnnnnnnnnnnnnnnnnnnnnnnnnnnnnnnnnnnnnnnnntcaacacccctgtgttaattgaaatgaatgggctgaacattatacacttaataaagggcatactcgagaccaaaggcagttattgtcttatctattctcatggtttttctacttcattatgctggaaatcatggattaggaaacttagagttggctaaaatgagacacctacatagcactttctccattactgtgcccaccagacatttttaatcaattacagatttctttcctcctgagcctagatgtgacctcaggcacattaggcgggacaaggttgaatcaatcatgaaatgcatcaatcaatcatttatgcacctgcataaacccagtgtactcaaaaatttttactgttcataatgttcacccactcatttcaattccctggacctcagttttcccatcaacaaaatgacataatgatataatgatacaattttgtataatgcaaactcatacaatgagctctaaatcttcaagttatttacatgtctaacattattttcttccctaaaactcgtctcattctctgaaggtattgcctgtactttgtacttttggactgcccacccaatgacttgctggggagcatttatggttgggaagaagggaagtgctctgagatgaattttcttgaacggtaataataaaaataatccttatctctgataggttttctctttctccttgcaggttgacaggactgaggtgattcgcacctgcataaacccagtgtactcaaaactgtttactgtggacttttactttgaggaggtgcagcgcctgcggtttgaagtccatgacatcagcagcaaccacaatgggctgaaggaggccgacttccttggtggcatggagtgcacacttggccaggtgggtcaacagacatcccttcctcctccttgccatcctagggcctttcttcctgccccctttccctctcttccttcatctaatccttgctttttcctattgattgtattttctttaacatgcagcattttacaacttcccaggtggtgtcatatccattatgtttatgtagagatgattctgcaagtctgtacgatttcttattttgaaaaattcagaactttctcttctgaattcccccactgtgtcactcatttattcaacaactattattgagcacttatgtgtctggctctatgctcttttcacatgtctgttatagccttatcctgtttcactataaatttccatctccaactcagctgtgagaacccctatgcagcaagtatttctcattcacatttagtcgacatctctggtaccaaaaatagcccaaggcagaggctaaatggatactcagtgaatgaataaaagctcttaattttccaacaataatatgaaataaatatcagtattatatccattttatcagtgagaaacctgagactcagagaggttaagtgatttgatgaaggctctacctaataagtagcagtgttaggactctactaggtcttcctgactctaaacttcatcattttgcttctgtaatacttttccttttttcctttcctttttgttgtacccagaaatgcagtaagtgagtcaaaaagtaaaaacagtccctgtgcccagatagtggataatcttactggagaaggcatagtaatatgcacttcaaatagagcagttcattacaaaataccctgggctctctatacaaggtcgtagaccttaaaggaagagagagcttttttctactgggtagagtcaaagaaggcattgtggcaccaaaatctgaaaaaaacattatctagggattgcagaagaaagaggaggggagacttccaagtaagaaagcaatataagcaactcataggggtcagaacaaacgtgggggggtatggggtgggaagagaccactttccctgactgaatcaagatgctgatttactgtgaaattgatgaagctttaacatcagatcccctctctcatgtgggccccttccatggctctgtgtcacatttttattttgtactttttttctcaaagagagattccaaattatatgtcttaagacccacaaaatctgggttcacctcctgtcaaggtaagggtcaggtttaaggatttgtcaggaagagtctacctgacaaagagatggcaagcatatatatttgcttgttcatttgtgcttaccttgcttcatgccacttatcactaaaagaaatttctcccagtgagcactaagagacaaaatagacagtgtcctctgttccccttttccagaaaatatagtgattaattttcttattcctttaatgaaagtcaaaagcccaatactgaaatacagttgaggggagacagaaagagaatctgaaatattctccattaacatatgttctctaatgacttttgaagagttgatggcagatagttcaaaggatcttgccaggtacaatgtccactaagtaggtattaaatgaataaatgcattgtggatttgagatgaaatcctgtttctatttaaaaatgattaaaatggcatcttttatagacatgtaagccatgccaagattctcccttaaacaatgggcatccctcctatgcataaattttatattttgtcacaagaaataaaggtagatccggccaggcgcggtggctcacaccagtaatcctagcactttgggaagccaaggagggcagatcacgaggccaggagatcgagaccatcctggataacacggtgaaaccccgtctctactaaaaatacaaaaaaatagccgggtgtggtggcaggtgcctatagtcccagctactcgtgaggctgaggcaggaggatggcgtgaacccggaaggcggagcttgcagtgagccgagatcgtgccagtgcgctccagcctgggtgacagagcaagactccgtctcaaaaaaaaaaaaaaaatggtagatccgtgtgggaatcatgtggactaaagatctttttttttttttttttttggtccaaagctttgataattttatctgtttgaatgaccctcaaactcaaatctttagtccctcacaaggctcatctttccaaaagccagtaagtccttaaccttgcaagtaagacaggcattatgctaggtgccagtgacactgtggtgagccaaaaaacataatccttgccttcaagcagcagtttagttggggataaagatggaatgaaaataattacacaacaattaattaaatggcgattatcataagctttgttacagagaagtacagaataagagagcaagcattgggagactggcatcaggcagagagagggatcaaataaggctttctaagagaagtgacatttatactgacttgaagggagagtgagagtgcatcaggtgagaagaaagagaaacacattctaagcagatgggaacattatacacaaagcctctgtattcaggaaggagtttggcatatggtgcagagcatcttcatttggtttttccaagaagccaaatctgaggtaagaagtcaaaggaggtgaaggaaacgccatagtggagaggaaaagtgagacaggataagcagcctacaagggaaagtggtcaagtagataccaccgtacgtaactggagcttaactctgctggggaaattctgagagcagtgtaatgcaaacattacagatatttcatcctgtggatgagggaactgggacatttatacactttgtgtatatatactcacatcagccatgaagaaccattcctagccgggcgcggtggctcacgcctgtaatcccagcactttgggaagccgaggcaggcggatcacaaggtcaggagatcgagaccatcctggctaacacggtgaaaccccatctctactaaaaatgcaaaaaattagctgggcgtggtggtgcatgcctgtagtcccagctactcgggaggctgaggcaggagaatcacttgaacccaggaggcagaggttgcattgagccgagatcatgccactgcactccagcctgggtgacagtgagactccgtctcaaaaaaaaaaaaaaaaaaacccattcctgttcctaaggtgggaacattaatcctccagtcctccaacatttctggcctactgtgcaggtagcaaactccaaatatcacaaagagcttgcaagcaaagaaatacagatgccggtggtcaaagtcagtgatgggcactcaagtcatagggcctgggaatatgagtggggagctgacagcatctgtggattgcctatttaatacccaatcacccactcttgtagctgttgactctgatcactttctgatcattttataccatctgtctatgtagaaaagagccctatccctagctcaagagtgaatcctgagtgatctcagctaatcacatgaatctcatcacccacttgcaagagtttggtttagaggtaggcgtgtgtccagtaagacatgtggatttttcttggaaaggtttcctagcctaaaacaagagacacgcatgaagaaacagttcttctttgcctgtgattcctggaaccactacagccatcttgcagcaaggctgaggatgagagtgacccttaggggaggtcagacccaaaagatgtggagggatgggcctgacattctttacctgggacccactctatctatggatgccttattatgggaaaataaaatgtcctgtcattgaagctgtttgacatgggaatttttattccttgaactgaaaacatcatgatggagatagcacatatgaggaactaaaaagaaggacaggctggctggagtggggtgaacaaagggaaactagggggttgtgttggattaattttcttaatctttcaaaagaaggaatgtgtggaagtgagcactgagaatgagattacaaatagtcctttcaagatacgtttttggtacttttgaaagaacttatatactgatcatttcatttgaccctcttgacagcctgggaaggacaggaatcattatctacattttataactgaggaaactgaagatcagaaagatttaatgtcttgacagggcctaaactggaagtcaggagcttttgattcttaatccagagcttgcttctgtcatgacctagggaaggatgagaggaggtcacctgttctgagaactccttcaagatcatggcctagatgaagcaaatgagcagcaagtgacttgttcagtgtatctctaaaccatgtttcccaaactgtactgatccactttgaggtgacatgctggcctctctggatatctcgcatgttctttggcaaccaccctctcatattgtcagccaggtgattggtggggttggcctttcccacacttttgggtaggcacagaatattacatttgtgtggccacagtgattggctcaaggaaagacatgatgactcctttaacactatagatttcattcattcgtttatttcttcttttaatgacatagcaattgcatgccaagctttcataacaaacgtttagcaagcaccctggatatgccaagtatacctggctgggtgctggagacacaaagatgaaaaaggaagacagaggccctgcctcagaaaagcttataattatctgagaaacacagactggtaaataaatactcaaaatgcatattactaagcactacaatagaaatgtgaatccaagggctgtaggggaaagacctctacctaaagtgaagcaggggagtctcacaggaaaggtgtctctggatctgaatccctaaggataagtaggaattcaccaacagagaaaagaaataaggactcttgggacaaaatgactggtacacgcaaagacacagcagcatgaagggaacgacagagaactcttaagtgacttagcgtgggtgagcggtcaagtgaggatgtgaaaaggatagaggatgccagatagaaaagaaaaagcctggtcctgatgcttttaagtgtttttctctaaactttagagagactggacttgatgcactgaggtcctaactggggaaaggacaagattggatgtgtatattagaaagatcactttggccgggtgcagtggctcacgcctgtaatccaagcacgctgaggctggcagatcatgaggtcaggagtttgagaccagcctggacaacatagtgaaacccatctctactaaaaatacaaaatattagccaggcatggtggcaggcgcctgtaattccagctacttgaaaggctgaggcaggagaattgcttgaacccgggaggcagaggttgcagttagccgagatcatgcccagcccaggcaacagtgcaatactctgtctcaaaagaaagaaagaaagagagagagacagagagagagagagagacagagagagagaaagaacagaaaggagagaaagaaaagaaagaaagaaagaaaagaaagaaagaaagaaagaaagaaagaaagaaagagaaagaaaagaaagaaagaaaggagggagggaggaaagaaagggagcgaggaaggaaggaaggaaggaagaaagatcactttggcattccccataaacggtggatggcagggaaaccaattaggatactagtgcaataacaggaaggaaatgcgggcggcagtagttatgtaaactgaaaagagggggccagaaaagagcctgtccaagagcagaatcaacaagccttggagatgaggtgagggaggcggagtttgcaggtgtctggcttagctaactgggggagcgatttggctgtctttaaggggaaatcaatcttgcccaggatgggggtgaggaatataacatgatgctggcctattaaatgcagatatctgtggagaattcagaggagggtgacaatcggcagctgacatgaatatagaatagacaatatagatgtgggagcttaatccctataggtgatagctgctaatattagagtggatgagattcttcgaggaggctgttttatctttacttttgaaaggaaattttttgaacgtgccatatataaacaaataataaagaattaaaaaatcaaggcatatgtaaggacatctctttccactttcagataaaagtgtgaactcgatgttgtctttaagaaaaaaaaaaaaaacctttgttgagtgttttttacatggagtaatatgccagacaaatgcatttgtactaaaagctttgtgaaggacaggcagaactttttaccctttgtggtttcacaggttttgacactttggcgtgaatgggggttttgctcttttcgctaaattgctcctctccagtatgatcaagcaaaaagaaaaaacatcaacattttccttctttaaaactccagagtaaaaagaaggtccttcttcctgtgttctgcctagataggcaaggaatggctagatgcagatgttgggcacccccgggcagggcagggtcagagtctgaggcactgtttcctagtgctgacgtgtacatggtgtggggtctgatggtctggggtcaaatcccagctcagctgctctcaacttgtttgtccagaggcaaattcttgcagccacttaagcctcagtttcttcatttgaaaaatggaaataataatagtgctgacttcaagaaaaattgcaaggatcaagtagaataatgcacataaaatgcttaacagagcccccggcatggagggagcactcgggatggggaagctgttattactgtggcaagaatctaggaaatgatgggaagaggcaatgcttgtagagaccaacatgttttcagaacaaagggggaaacatacagcgtgaaaacattgtgagagagcacctacgtcctgggcgagtataatagtaaaactgaacttacattgctcaggtttgtcaagtattttactgagttggattttaaatattgtgtgtgtacacacacgtacacgtgtatttattcttctgatactatttttaagtaaaaattgttttaaatcaggtctctgaaataatttggggcaattattttaatttgggccttaactgtggcaagatagggattgccacagttaaggccctaaaggaaagataaagtgacttccccaaagccacacaggaactcacacattcagagtctgcctcctgaaggctgctgtagtactcgctctgtctggctgagtttgccacattctcactcagccttgtgaaacagcaggactcctggcctttaggaaaggaaaatagaagccttaagcatgctagaaactggcattggtcataaagctgagtataagcacagcaagtgacttcacactgagcaaaaatgccaaataaagcaaagaaggctgaggtcctcagggaaactcaaggagaattgaccattcttgacagatggatgagggggatgcatcacgaggacatagggtactcagaagctgcctctttctgggtaagttttgagaccttccttagatttctgttgcccaaaagaaatcaaggagctaagcccctcttctgctacatccagtagtgggtacgccaaagagagatgtgatccttcactgcctagaacagcaagctgaccttctttcatgtgatgcatttattttctctttcactgcttattaactcattcattcatcctcatattttcccacttcatccaccaaagacagtggaactgagtcataaataagaaaaataattaaagaaatttttaaactccaggcacttttatttagtaggcactgggtgaagctgttgctatactgcacttcatttaatcagcacaacatccctgagaggtaggcactaccattattaccattttacagctgaggaaactgagactgagtaaagctcagtaagttatccaaggtcacacagcaagttgtcgatctctttagctccaaagccctgtataatcttttccatctattctaatagcttgtcactaactagtataaatgatcaagtagcatctatgaatgcaaagtcaaattggagttgacctggctagtttttggtgtcttgtttcttcttaagtttatttgtcttacacagagctgatagaggcagactaggaatccttttgcagataaatgggcttgatcatcttccctctgggcttctctactgaatttactttaaatataatatggcttcttaaaaaatggcagtgtgtcaacctccgaaaaccaaaatcttacaaactcagcacccagaaggtgcattgctctggccttcctttcaccttcaaccatgatgaaaaatcccttatcaaaattcagtggttgcacctgggtttcatcattgcttttcttgcaggcattttctcttctcagtggtttggaggacagttatgactgtgtgaagtcatcttctcttcattgttgtgtggctgttcttcagtgtatgtctcctccagaagttcagaggacacctgtcaaagccaagaacttcctgctttctgtcatcataagtggggctgggaaatccctgacaccttgaagaagtcctgggctgtcaggagtcctctgacccttattcatgagagagagattatataccatcttctctcagggcagtggttctcaaacttgagcatgtggcagaatcacctggaggcatattaaaatacaaattgctaggcctcacccccagagttatgattcaaaagatctagggagagattcaataatctgcattttctaagttcccaggtgatgcttattctgcaggtccagacatcacactttgagaagccctgccccaatgcctcatgtaagaggatgctaatgaatcttggacactgtattactagtttcaatcaagaaaggaaccagtgttttgggtaattatctggagaaattgaagaggacatagaaaacatctggtgaacagaaaaaagttgctttataaagtttacactacaaaaaggccaatgtacacagctttcagtttatgctcttggtaaagattttgagtgccaaagttttttctcccattcattaaatgaagttaaatggacttattatccattggtttccttcctgacataagtgaatgttaggattatgtcaggcacagtggtccctgaaagagtgggcagaccacaagctattgatcaatgggtattaggtttagtgtcgggatgagccaggttgctgaacactgggtgttatgatgatgctgagggtggtacccaaactcaatgtaatgcccacagtaagattccacaggttagcattttgttgcatactatctaatatcctcatggtataaaattgatgacccagggaagtcaaatttacacattacagcagggaagtcattctccttctgcttctcacatgcaaagcttgcccttactttgcagaattactgcaagcagaagccacgtgagtgatgaatgatgtcataagtaatcacatcatctcagctcccgtggactagataagaaatcctgggaagtagtgccatttttttttttacggctgtctgttctgctcataggcagctgggatttaagtagggtggttgtgggtgagaaggccccatttctacagggagaatataattaattcttgctctttttttctaacttctaaacaggcaaggaatcataactttggatcctagaaacatccctctgctttctctggagtcctccttttatactttgaaatctcctttagtgtcctggattggagtcatgagtcctatgtcttgatctgccatcaactctctgtatggccttgggcagtttgcttaacctctctgtgatatggtgacttcatctatagaacaaacattttgcattgattcatctctaagttccttccagttctaatagtcaatgattctcattcatctctttccttttcttgttttcgaaattcagcatctctccacacattctcatttcttttcaagacactctctcccccttccactaccctttctcatctcatctcatctcagcatgaagtatttatctcatgtaaagtcatagatgtcgttcagtcatagatggtatcattctacctacctggtagcccccaggaaaacaactgtatttaatttcaaagatagttataaaaagatgtatttagtgacaattaacacaggcccttttccatatacactcacattcattagtatgatacttctacaagctcaatattggtgcagaggagggcaagagctttggagctggatgacaatttgcaaggactagtgtatcaatgctaaaaaaaaaacagctacaggagcctgtcctgatcctaatcctttaagccaggctggtgcagggcacccagcccccagaccaccctatcagtgtgccctgggcctacctactcatccagggagccacttatgccacctgggttggcaggtggcataaggcagtttctcaggacctctcccacagctcccacttttgttgtttccaaccagctttcatttcaatcccatttccaccagctcagaagtactggctgtaaatctaatttagatcgctatctccatggcatttacacatactcttccaatcattcagcccttgtgtttcccctacaaatgctgccatgctgcaccttctcgattgtcagcatcctggctgctttaaataaaaatgtatgtccttgtcctagccctaaagcatgaaacactccaacactataaactgaattcatagtatggcaaacggccagtttgttgaagtctaataaccaaaaagccaattcacgaaataatatattaacccccaaaccaactctcttccaattacttttatttactaaaaactagatttcttgaactattgataaagtttactacaattattttagaagttgtgaagatttcgggaatatttgttggtttagactgcttatgaaatttagttattggttatcatgaatgtttctgaatatcaaatgtagccattaaaaagctaacctgtcccaacaggggattaaaaatatggtcctaactattaaagtacccatttctttacaggccaagagactgggaggatatatttttaaatgttaacggtgatgacatctaggttgtgggattatagatgatgtaggaaattacatctgtgcttttgtatttctaaaaggaaactatatcacatctatgattagaaaaatattataataaatgttaggcaaaacatcataataagacccgcatgctgacttcaaagaactcacactcaggtggaggagtaagacacgtaaacattgtgtagatttttaaacaaatgtggaagaactttaaaacttgtaaagaattctaatttgggaaatttacaggaaatccttttgggggaggcatttgctgaagctgtgctttctgtgaggtttttgaaagatcaatttgcagatgttagtccccacccctttgtccacagggaggagagttggctgggctaatttgattctgatcttttgaaatattatttttgattacagaagagacccaggagggcttggggcacgaagaacaaataagttaaggaacatctctggaactgaaaatgaggttctgagattcctccaaagtctagactcctcatttcaagctttatttgggaaagagaatagttttactttaaattaacctaataaagttgagggggaggaaaacaataactgcttggtttacaaaagcattcccacgagtcttggtttcagattcacagacaaaatgaggccgggtatgaattaattagctttgttttgcatggaacatgagccgtcaagggcccttcccatgtgagcacaggtcagcaaaggtgcatgctcttgggcctaatctccatccaggtaagcccagggtgggctgattactcgtgcttccctcactcttcttcagcatctgctcatcaggatgctcaggccagcacacgttttcaagccagttatcagaaacaaaggaaaacatatcccccaaacttctctctccccactgagattcaaaccagtaaaactggtattacagtgaatgtgctgacagggcaccagtcagcaagaccgaatcagaaaagcttaaaattgagaagacaaaagcagtgctgagtttagccaaccagagcaggcatctctgtgctgctctctggtgctcctggacaatgcttaaatactctttaagggggaattcacttttacatatcaggtattgtgagaatgatagggtaacctatgactcagtttgcccctgcctgtccggtttacacttactatcatggcttaattattaacactgttccctctcactttcaaaagtgtcccaatttggacaatatattttacgaccacttgatgataatcattttcatagctagtatttagtaagagctgatcacatgccaggcaatcatgagcttggtgctatcaacactatcatcatcattattatcatcactaggccaagattacatgcctcctgaagtggcaaaggaagggcttaacacctaacatttggattcagtcagagtgctaagctacttttcccttacctttaagctacattacctctgagcttttgttttataaacttaatgagaaaaagattcttgtccctttatgaatgccccaggtcttcccactgacttcctccttggttgtcaatcgaagggaagaaactgattttcagggggtcttgttatatctcagatattatgttatgtgaagccccgcttgataaattatgaattaggctctgggagctcaactgattcaccaaagagtacactgacagtaagttgcagagcgaaatttcaaacctaagttgttctgatttcaatacctgccttctcattatactaccttgcctactaagccactttcaatttctacaagcctgtgtaaatttgaaaaggtagagtagcagttcttcccatatgctgtcactgtaaaactgcccacagagaggataaaagtatccttcctcacaagttgataaattgactcctatatctaaaaagtgtctttttcccagctcaggcagacctgtaacatctatctgcaaatggacactccaccaaaatactcttggaccaaaaggtctaagaaatgtatagcagttagaccccatctttcccttgacatggatctattgtttatatggcagttaagggtaacaataatctgaaaataactgatatgtattcaatgaataatgcatctatctaatgctctcaataataatcaaaagctaatatacatgtactcacttattcaaataaatatatatggattctttatccacttattggaacttactatgtgccagacactcttgtaggcactgcagattcagttgtgaacaaaggaggcaaagccctgcctcatggagcttacctattcctacatgatacaataacagataataatgatctcattgaaagaaagcacacatgggataagaaatagagggtggcgggaaaggactgggtgctaatttaggtaggaatgtcaggaagtcagaagaaaatgtaaaagtgtgggcatgagccatgtaaagacatccagaaaagtgttccaggcagagggaagagcaagagttcttatattctgccagaccctatgctgaaagcttcgtacaaattatctcatttaatcctcacaaaccccctgagggtaagtgtcattatttcttcattttgctgctaagcatttgaaccttgaagtaacttgcttaggagcacacgattttctaatgagggaggcatgagttaaactgagccttctggctctgagataacatccccacctcaactactaaacagttccatgctttggtcagtctgcaacaacctctttgccagcacttttaacacaagatttagagaatggctgattgctgagaaacaacatctgcaaagcctgcatcaccaatggatccacagggatagggcatttaaatgattgggtccccatgttcaccagatacggcactctagcaactgctgggatctcttgctgctatgactctccttcagctctgttagaggctgtgggaccagcatcccaggctcttcctccggacacccaagaaattctcccacatgacgtcagtttaagccaagcaagaattttccgtccctccattgcattatttgtaggaaatggctttattgtttttctgtatgcaaagataatataggctcattgcaaaaactatttagaaatagaaaaaataaaatcaccaccattgagagataactaataaaaagcctaccattaagagataactactaaacatcctgatatcagaattcatgtaatgtgtccacttaccgtggacattaaggctgtttccagttttttagaattataacatttttatgagtattatattattatgtgtgtatgtatatatatatatatatatatatatatatatatatatatctttatgccctcagacactgattttttttagaatgaattagtaacagtgtattatttgagcattcattttaaggtccttgctataaactgccaaatatccccaaagaaaaactgtagcaacttacactgcccctttcagtgcacaaaggtgccttttttcctgcatcctcagtaacacctccaacttttcactttcttttgaagcttctatcaccacaaaaacaaggatacagcctctgtcctagttgaatgtccccccacagagccttcgccatccccagcctgagcagagaagacacagaggagagtgtgtcatccctcagctcccccttggccttggggactggtcccatcagaaggtttattcagaggctgagggtacagtgaagacaggagacatcactgtggttctcagcttggaagactgcctcactctcacacccttttctttctttatacattcctccatcagctcctgcccttccatttatcatctatacttggagactcttagctcaggactcttctttgagcccagactcatgtattcagcattctctagatattaattccacttgtatgactcacagacatctcaaactcagcagcccaaaacaaagctcttcatctcctcttgccctctccacaccccttgccatcttccccttcctctaatgtgtcctactcactcagtagctccttcttcttcccaggagccagaggtccagaccctaggagcttttcctcatggctctcattcactctctatcccacagcccatcaatcagtcatgaaggcccatcaattcagtgtctcaaatatctctactatccaccccttttcaccccttccacagccaggaccccagtctaagccaataggtgactataattatctctacatggggatttattgaatgggagagaaaagaagaggaaaatagcatttcccaaacatttgtatatgcctgatgctgggatcttgttaatgctcattagatatacaataaacccatggagtagtaccatttcacagatgaggaaactgaggctcagagaggttaatctgcccagggttccataccagggagactatttggagccttatatgtgatgcttgctgtaccattctatagcaagagtgaagctagggggctggttcagtggcccttgtagtggtttgagtaagagggaactctcctcaatggtaagttcattgaggataaagagtgagtgtgaatttctttgtgtatcttgtaaggtttagctcagggcctgatcaagtcctgcctctgtcatttatcagagacaggagagtttagcagttaagggaatgaactctggaactggactgtctggattcaaaccccagctctgctaattactggctatggaaccttgagcaagttactcagctctctgtagtgggctaaacagtggcccccaaaaatatatgtccataccctgagtcctaaatcctgtgaatatgaatttatttgaaagagcctttgcagatctaattaagtaaaggatctcaagacgagaaggtcatcctggattaaccaggtgggccccaattctagcgacacagaggagagacagaagagaaaaggaccacatgaagaaggaggtagagtgaggcagccacaagctgaggagctgcagcagccacaagatgctagaagagacaagaagcagaatctcccctaaagcctctggagagagtgtggctctgccaataccttgatttcaaactttttccctccagagccatgagcacatttctgttgttttaaaccacagagtttatggtcatttgttatggaggccctagcaagtgaatatatttggtcaatgaaaagagtcaaactatgtaaaatatttgaagggatttattctgagccaaatatgagtgcccaatggcccacgatacatccttcaggaaaacctgagaacatgagcccaaggtggtcaggctacaacattttagggagacataagacattaatcaatacatgtaagatatacatcggttcagtctggaaaggtgagacaactagaagtggggtggggggcattgggatcatagatagattcaaaaattttctggttggcagtgggttgaaacagttaagttattgtctaaagacttggaatcaatagaaacgaatgcctggattaagatacggggttggtgagaccaagattttatcatgcagatgaagcatccaggcagcaggcgtcaaagaaaagatggcaaatgtttcttatcagacttgaagagtcttaaagtctatgttgatgttaatgctggtcagctgggcctgaatcccaaaagggaggagggtataatgaggcatgtctgactcccccttcctatcatagcctaaactagttttcttaggttaactttggaatgcccttggccaagaggaggaatccattcagatggtcagggggcttagaattttaatttcggtttacgattctgtatacctcaattttctcattcatacgtaagcttataatacttaccttgcagagctgtcatgagaattaagtgaatcaatatacataaggcactttacagtggtagctgtcacataatcggtgttttcaaagtagtgtttattatgaccctttaatagttgtgtgaccttagttatttttgagcctgtggtctttttcccttgaaaaagtaataacaaaaatacttagcctaactatagtatctcaaagtgggagtttgcctctttcacttaaaaacggtcaaagaattccttcaagcatcttctgacctatgaactgctaacattcaggtgtcaagtctcactgaagacaactcacaacccaccaaaggcagtgattgaaaagataccatgtgcccttgacccgacaaaatgctctggccaggacattaggtgctaggggatgtgggtccttttctctttctcctggctgccacctggtgtggccgggggagggagatgagaagcggagatgggggtgaagtgtggggcagatggcctctgactaataactgagctgggtcatttgtaatgatgacaaggcattacccaagagatgaggcaaaggtgtataattaatacacaagcagtccttaaaactctctctgaaaccctccttccattccttcccttgctaatgaagtcagagacagggtaaaagcctgtaattacacttgaagtaattagaacgctgtgaaatggaaagcttaagacaggaagctcaaactaatggaatacctattgctcttgttattctgactcatccttcctaggatggtgcttttgtaggtctccactggggagctgaagactgtactgaatttgcataaaatgtagacacacatgcacatcaccctttccttccccagagtggccaagaaagtgtcagcattgtgccttcctcagtttctacaacttttacctattaatgaaagaccaaatcagcagaacagattaatttaaaagcccttccaaagataatttttaaaaatctgagcattttatatttaaactttttttacatgcaattctccctttctagctcagtgcttctcaacatcaatgtgcctgcagagcacctgagggtctccttaaaatgcagatttggattcagtgggtctggggtggggctgagattctgcatttctaacaagctccccagccttgctgctgctgttggacgggggagtggtacacaatgtgagtagcaaggataaagtccttcttggtcccacaagtgacttcactttcctccacagcaatgattccaaacttctcatgtagagcttgaaaaatgaataaaaattttcaattgaagggaaagaagagcaagtgaggaggaagagtggaggaagaagggaaaagtgggtgggaaggtaggaagggagggagggagggagggagagagaatgtgtgtgagttcgtgtatgtgcatgatcaggtgtctcttcttataaggacaccagtccaatcagattggggccctacccttatgacctcatttgaccttaattatctccttaaagtttttatctccaaatacagtgactctgggggttacagcttcaatatgggatacacaatttcatccataacactaagtgaccttagatgaactccttaatttctctaagacttgattccttcatcccaattgcttggagacaagaaagagttaaatcattaaatgacaagaaatgatcattaaatgacatttcataaatgatcattaaatgacaagaaatgagttcatctaattagcattaagtgttccacatatcatctgtcacagaataagtgtcttggttgtgttcttccagacacagtcaagcattggaggataagtagattatttgtgaggtgaaggaaacagcaggagagaaaaaagagaagtgagatagcaaagagaaaacagccaataaaataaagggtgcattagttaacaaatcaccactgggagaaactggagcttcatttcactgggacaagtcaggcacccatattgaacaaacacccagtgtcagccctcactactgagacaaaagagccgagatatttatgtaccaaagaccatcagtcactggttgagatctgcttccaagggatgactacctccccacttccatcttgctgtgcttgtggatagtagccatggataccagaggaaactttcaggcaaagagatgcctgaattggctgttggaagccctaccagctctgcaagagggaggcctgggaagttctgggcagtttttccttgcctgctacagtgagagaccaggaaaccttagttctccgtagtggttggtcctagtaattgtactaggagtttgcaaaacactagagagactcctgtaccaaagaaatctcaggccaaacaagtgtaaggaatgcttgtttcatgggattcacaactaaagctctgttgaagtcctgtagttgaaatgttaaactttgtataatcctataaattccaaactcatttacaccaacactttttcaaataatatgtatttaccttttaaggaataaaagttctataatgcatgttttggggctatcaaattaaagctagctgagatttcactacattgtaagatgtttttaatctgtttctactcaccattgtagcctatgaacagtaactggtacctagaaagtattcaataaatatctgttattgtaactgttttaaagaatataaaaaaaattctgaaaatattttcaataaaaacagcctcatgaaaaatgactctctagttccaaaaatgactgtttcgaaagacttcggaataaagttcagctgaatataaacttgttgaaatactgagcagtttattctccttgctttgttcccacttaatgaaacagtgcatttttctaaaattgaagacccatgctgttagaagccattgtccactttgctagagaagaaccacttctccccagatccgtgggtggatgcagataagagggctaatggtactaaggcctctctggtccaaccttgctaaaaagagtatttcaacttctaaatcctccctctacacttcacccttttgttgaatactaaggtttgcacctgtgaccccatcatagggtataaagaatcaaattaaggaacttctgacaaatggatcccttttaaccttgatgtcaggcacaatttgctatttgttggcctcaaatgtcagctgaagccagggtgagagtccttgtgactctgactttctcatcttctgtcaagacctaaagcatttttgagctgggtgcagttgctacagctgcagcaaagtgtacatgataagtgggatttgcaacaaataggcttttctctacagatcactgctccagttgggcttctttgctatttttgcccaactgtcctgagaatagcaacatcaatggcaactcatttcttgtccatcattattacaatgaaaaattcaaaaccctgattattactcattccttggagctgagatggaaacctcgaggctgtaaaacaccacttgtatacccaaatgcccatttcctaagaagggatatttcctgggaaattgcttatcttcctagcatttgcaaaaggcaaaagctggcatacagtagcattttcttcattccctgcaaatggaacattggtatttctagataagttaagagtgaggagagagaactatggccatccaggttctcttgggattagtctcctttactcttccttgaataaagataatgtgaatcttgtaagacactgtctgtaaaatggtctacccacacctgctaatgcaatgagtgggctattatagggccgagagggttgttggggtctcctgacatcaggggagtaggtgaccaatgcggatgaatcacaatgacaatggacattagtatttctgagaccagatttgtttgggaaatgggatacattgcctttctttagtcagatgttgtcctggctactgcttacagatgacccttgttttgtcacttactcatgtgtcttccccacttcccttgctggaaaaaacgtgcagagaaactgtaagctccgtgaggttagacattgcatcagattttacttaccactctattcttagtgcctaccaccaagtctagcatacagtgggggccaaataaatatttgtagaatgaataaagcatctgtaacataatatgtactccttaagtgagagtttccattgctacattgctatcattgttgtcatcatcatcacaaacatgatcatgatcatggtcatcattaccaggtgatttttttacagaaatattttctcttcagattatagcagactgaacatcaagatctttaaatctgcttgtcctagggaagttctctggacttcttgcatttggcactagtagagacttggtattttcattgctgtaacacagacaaaaataaatgaaaatttcaaagaatgagtttacctcctggcctttcatggtgatctcctttcctgtctttctgtgaataatatgtgtacagtatcattgctctctgctaataaaaaattacttcaaaacttaaaaaaagtacttcaaaagcttaaaaaaccaaacatttgttatctcagttgctgtatgtcaggaatcagggtacagcttttctgagtcctcttcatatatttttgtctctgtgttactgcaatgaaaacaccaagtctctactagtgccaaatgcaagggtttctcatgaagctgcaatcaaggtgcagttatctcaaggctcaacttagaggagaatcttcttccaggcttacgctcctggctgttagccagagacttcagtttcttgccacatggtctgtctataggactactcacaatctgtcagctagcttcctccagagcaaaggctctgagagagagaaagaatgagagatagtggtaagatataagatataagatagtgataagagataagtcacagtcattttgtaacctattctcagaagtgatatcccatcacttttgtattattctattttttagaagcaagtcgctgggtccatcccacacttgaggggagaatattacacaatagcatgaatattatgaagataggatcattgtggaccatgttaaatagaagcttccagccacaatggatgatgttgttccctctaagcatgagtgtagcttcaacttggttcttttttttttcttaattgtactttaagttctagggtacatgtgcacaacatgcaggttggttacatatgtatacatgtgccatgttgatgtgctgcacccattaactcatcatttacattaggtatatctcctaatgctatccctcctccctccccccaccccacaacaggccccagtgtgtgatgttccccttcctgtgtccaagtgttctcattgttcaattcccacctatgagtgagaacatgcagtgtttggttttttgtccttgcgatagtttgctgagaatcatggtttccagcttcatccatgtccctacaaaggacatgaactcatccttttttatggctgcatagtattccatggtgtatatgtgccacattttcttaatccagtctatcattgatggacatttgggttggttccaagtctttgctattgtgaatagtgccacaataaacatacatgtgcatgtgtctttatagcagcatgatttataatcctttgggtatgtacccagtaatgggatggctgggtcaaatggtatttctagttctagaccttttagcccttttctcctttgagaatcatgggttgccaaccaatcatggcttcaatgccttgtcaaacttctctttcaaaaaaggaagaaagaggaaaaagagaatgggacaagttctgctaggaatagctttcagtatgatgatgattttagttgtcattgcgcaggtgcattggcattgaatcatgaagagaaccgcaattacttctattgacttgtctgagcatcaattttctgatgacttactttatgacttcctaatgaatatattaaaaatagaactctagaagttatatttagccctttagttcctttccctccctgcaccccatcccccactttgcctggaggcttaatgatatatttgagatcattttgaaactttatctactttgtcttaacatacatgtttaaagttgtctgtctaattttaatatacatccttcatcaacaattaagccacctcccaattgactgcattatctgtaattcttcactcactaactctctcatatcacacaccataagaagaaagagaaaagggaataacctatattaggagaggctcattgacaaaccctgaaatataaattgacacaaacgtgaatgcagagttttgtaaaaaaaaaaaaaaaaaaaaaaggtttaaaaaatagatctacagttaaatgactagtatctctaccttttgttaccttttgtttccttttttgcagattgtttcccagagaaagctgtccaaatccttgctgaagcatgggaacacagcagggaaatcttccatcacggtaagcaggcactccctaagcagctgtctgcctgagtggagagcctgggcggactggccagcccaaaccagacacttgggaagcagactttctgatattgggagttggtgccacaactactgaactattgaaatcactcccttatttttctttctttctcttttctgacaatacaattttgatccttctaactctaggaaaaataaaaaaggaaaagcatttgaaagtaaggttatttaattctagtaagcacttctgcaattgcaagatagattttagtggaggagaaagatgtagttgttgagcacagtgagattacggaattgtctagcattttcacacaatcaaagcttcaaagctacgtgtcctcgtctctcatttattttgagaattaaaattttgctttgatagcatttacttcaaggtttggtttgtttcctgacaaacaaagagctcagcatttaacactcctctttgatataatagtttggaggtttactgtgtgattcagtagccactagccacatgtgattatttaaattttaataaaactatttaaaattaaagtaaatattcagttccttaatcacactggccacatatccagtgctcaatagttacaagtggttagcagctaccatatgggacagtgtagattataaaacatttctataattgcagaatgttctattgggtaatgctagaagtatttctaaataagagcttacatttttgaatggaatgcctggtatttgaaagttcgacatcttctattaagagaccttgaaaaaggtagaggatgttgtccaaccatttggatgtatggagtgaaaaaagaaacaaacaaaaagacaagcaaaagaaacaaggtagaaaaaactacaaggaaattctgaattgctagagaggcaaattgccagaaaacgaacctcttgagttattttgaacattcctttttaactagagagaaaccaattttttttttttttttttttttttgagacagtgtctcagcctgtcacccagactggagtgcaatggcacgatatcggcacactacaacctccacctcctgggttcaaatgattctcctgcctcagcctcccaagtagctgggattacaggtgcccaccaccacacccagctaatttttgtatttttagtagagatggagtttcactatgttggccaggttggtctccaactccttaccttgtgatccgcccccctcggcttcccaaagtgctgggattacaggtgtgagccactgcaccctgccctgatttttttttttttttttaagcacaggaaaaattcaaaagagctgtcagtgaaagttgtggccattctcacaagaacttacctgagtttgttgcttgaatattttaaatgacactgtcatgttaaagctttttcttgactgccatcttcagtcatgaatcaaagtgttctttgaagacactgatggtgctctgaaaagctatggacccacgggttcactcccaaagcccacaaaaccagtagatccaggtatgaatttgctatggttctttctcaaaagaacaaaatctcatcttgccatattttctctgagatatcctgagattttctttctccacatatccaagaaaagtttgatctttttcttttctttcttttttttttttttttttttgagacagagccttgcccctctcccaggctggagcacagtggcacgatctcatctcactacaagttccacctcccgggttcacgctattctcctgcctcagcctcccgagtagctgggactacaggcgcccaccaccacacctgtctaattttttttgtatttttttagtacagatggggtttcgccatgttagccaggatggtctcgatctcctgacctcgtgatccgcccgcctcacctcccaaagtgctgggattacaggcatgagccactgcccctggccccatttaattttaagtatttaaatgctcctcaactttgagtctttagatcaaaacattggctttaatagcttctagaaaacacttgaaaaggtgcatgaaattttctaggtctctgcagatggtgaaaatcataactttcatcagttttccaaaggtgtctgtgatcacaaaatacttaagggtcagtaatcaaatgaagtataagaggcattaaggtggtaagggacaaaagagaaccaaatgaaaaatacaaatatgatagttcttgggttatcaaccagttctagagtttttcctatatacctggactcacaatctctactctcagttgttcacacatttttgggtctatctgtcttaaggtagccatcttagctttaagattaagtgtaaataatttaaattttccaaaatatttggaatattaccagtgactattgaaagtatatggacccaactcataatggaattgttgagctcagatagaaaagaggtaaaactgaattatcagtatcttgatataagcaatttgataagcgtatccatgtgctgtggccacagaatacatggtaaatcctaacattatttataaaggttttaacttatctgcaacttgactggcttctagatttttgttgcttttgttgtcattatttttctcctgactttctccaccaatttctgctccaaggctttgttgagagtcactaactattaagtattggaaaatgacctattatgagaaagtcttttggacagtaatttcttcacttataccaaaatctttgtcaggaatggtctgtacttgggtgttagggcttaaatccttacgtatacccatatcttcatctcagaaaacccagggacagtcttttgaaaaataggaattagaaaaatttgacataaaaactagtttattccaacatttcttgttggtctcactcaaaaagaaatattgctgtttttccttctctgtaatttaccaaagggagacattgtagttaattatagaaatactatccaatgccatgtgacctttaaagaaagaagctcttccaaactgctcttctattttttccttcagcttgggtcccatctcttatgttctcttgctcagtataaatggtgtctagttatttaccattgtctattccagggagttcccttgaatacctagaattgctgtgctgtagtcactagggttgtggaaaaactctttgcccaacatttgtctttgttgagttttgaaccaaacaggaactaaatttgctcatgggttctggagctaaggagttcaccctctattgcagctgatgtgtgctttttcctttaggtgattgctgaagaattatctggcaatgacgactatgttgagcttgcattcaatgcacggaaattggatgacaaggtaaagcgtttggcattaaccttattgaaggaagtaacaaagctagcacacagtttaatcagatttccccctgcaactatttttccctttccacccacattatcaaacagatccaaaaattcagagaggtctacaaagtaaactttcccccacattaaagatcaattaatgagaaagggaagggactgtaattaaaacaggacaattctatgacaccaagactgtttccaaatgccaccggtgagatgtgcacaggtaaatatgatttaaccccatttctagggacattctaagggagaggagaagatatgaaagggaagaaaaatgacatttattgagcacctatgtttgccaagtacaggtttaagagctttttatgtggtatcacatttattcatttgtacaactcctatttatcgcgtattaatagtcagcccacttatgcattcactggttcactcttttatttgttaatttgttcattcattcatcattcattttccaaacctttgttgggtgcttgttatgcatgaggtgctggaaaaaaggcatatcaaaaatggacattccactctcacatctgcaacctggaattcatcattgaagtaaaacatacatctaaaaaacaaatgatatagtaataatatatccacaatagaatgtgataagtgatatataatagtgtgtcctggtaaggccaacttattctacctggggacatcaggaaatactttatccttataaactaattatatttggattttaaaagtgtcttgaatagattatatgaaaccatcacagactgctccattcttaacatgagcatgaactaggtgctgggaactgcagtgtgcatagatgtcagttgggagcaagcttttaacttcaccttttcacaactgttatgctccttctccttcatcatctccccaaatttcagaaaaactcacaaaacttctttatagtatcttccctggtgctattataagccactgggtcagtgtatagcagttttaagctacttgcttaatggcttataatggtttctctacacttagtatgctcttaagtacctctagtttgtcatctaactgatttatgttatagtaaaagggggcgggcttggaggtttgttggaccagttggctttgaagtgtttgagcagtttccctttagtcaaatgaacacttgctcatagaattgaaagagccccctgcagcacttacagtggttctaaatggctattcccaccattggctgtactgattgtccaggaccctggtcattgctgagcctgaatgccccagtgctggaaaccccagttccttcataatgtgactatgtcttgtccagatccttagtaattcagagaacaaatcagaggcctttgctccagtttggactggaagttaaatggtctcagatggaaagagggcaaagttgtagaatggaggagcaaaatgataacataaagatcatttcacacaacatcttcaggaaatgagggctcagcaaggtatgatgatttacccaaagacacaacactactgctctggttttctattgctgcatggtaaaccatctattctgtgtggtaaaccatcaaatctagcaacctaaatgaagaactattccgttatagctaatgattgtgagggtcagaaattcaatcagggttcagttgggcagttctgctgtctatgatgttgatgcaaatcactcagtggtactcagcttgtggatgagcttgtctggaggttctacactagctctacgcacatgcctcgcacatgagatggctgaatggctgggcttagctggaacagtctaccagagtgcctacttggtggtcctggggtagtcacacttcctttagagtatctggcttctcccagagaaagcatttcaagagaacaagggagatgctcggtggccttttctcaccccttcctggctttggaagtcatgcatcatcactgctgctgcattcttttagttgcaagtaagtcataaggccagcccagattctaggactccacatcgtgttagggcagtggcaaaatcatactggagaaaaagcatgtggactatgaacttgtggtggtcatgtttacaaaatgcaaactgccacaatatttttgtgatagaaatagaataaaataatataattatttcatgtcacagctggaaaaatagttcccagatgctctcaaggaggacccttttctagcttttagcattaaacaattttataactatctacatgtttgcagttaaaacttactgtatctagttattgtatgactaaaagtcactataaaataaacaatgctcctaattttttattatgttaatgaatatcatgaaagtcactagtttctacatacacttaaaaattgaagtatgaatatgtaggaaaaatatgctatatccaattcagacggtggttgtaggatgcctgcctggatctccagtcccttggcagtaactctggtagcccccaggagtctacatactttaggtagaaagccactgtctaatccaactgccttattttatagatgaaaattttaaagtttagagatgtggcatgacttactgaaagccacacaggcacacactcacaaaaaaatcagtgcaagagagggactcaaacagattgcctgacaaaatctaagtcttttggagcagagagttaatgaatagaaggtggtttggtctcagaatatggaagacttggaaatgttttcatgtatttcagggaagtaggaagccaggaagaggggaggtaagaggggaggtaagaggggaggtcaggcagcagtcctccaagtgtgatgcatggtcccaatacctttgcaggggaacccatgaagtcaatactattttcataataatgccaagacataattttctttattcactctcattatctcacacatgtaaagtggagttttccagaggctgcatgatgcctaatatcacaacagattgaatacagcacaaatataaggattctgctgcattctattaagctaatcattaaattggtttgcaaaaatgtaaactaataccattctcaccattttttaagtttggaaaatataattataataatttttccattaaaatactatttttgttatgatgtagtaggtttattttattatttttaaacaatgtaaccaatattttaacaatttaacagttttataatatggtaaatattaatacatacaacaaaacaaaagctctttggtatccccaataacttttaagaatgtaaaggggtcttaagaccaaaagtttgagaacccctgttatagggtatatgggaaagcactaagtacttttgcaaaccacagtgacagagaaatgcaccattctttttgacagaaacagtcatttttaatttgtctttcaacagactagcaatcatctccacactcttcaatgagagtgagtacataaaatagcttaggtttgtgataaataacttatttatctaatgttaatgcaattcacttagtagagaaagggactttctaacttgtaaagcacatttgttacattagcaactagtcggcaattaatctaacaagtaagtagagacagaaatgtaataatcactttggaacattcaagctgacaaaggattctttcttttcccattcttgagaaagtattcatattggtgcattggaactaattccgacactggtggtctccacatatgtaatagtaatcattatagactgcattttcagtgttcccatgatgctagtttgatggggtgcaatataagtaaacaaatctgtctctaaagtagaggttggcaaactttttaataaagggctagttgataaatattttaggttttgcaggacacctgatctctgtccccactgctcagctctgcctttgaagcatgaaaacagccatagacaatacaaaaatgaatgagtgtggcagtgttccaataaaactttattcacaaaaacaaacagtaagccagatttggctcatgtgccatagtttgctgacccctactctaaaacaatgtaaaatctctacctgctgtgatgtgattttactatgtttaagtatgcctgcttgaaactgtaatctggtctgcattaatgatagaaaattataattattgagcatctattatgtgccaagtatcaggtgtctaacctacattatccccaaagctcataagcatattcccagaagttagtatctttatttccattttatagataaagcatactcagatcagacatttcccagagtcacaaaattaataagctgtacagactggatatgcctacatctttcagataatttcttctaggtccaatattccattttcaagatcaccgtcatgggtatgaactgcttcctaattgcttatcaccctcttacttagctaaatttcttttatattgaactaaaaaagcagaataatatggtctctgtgttattaaagaattttaccacagcaacacttcagtaaaatgccctattcattcatcttttttgaactgaactgtcccaatggccatcttagtgctaataatcaagttttaaaaagctgaaaattccaaattaaagtgaccacacaattagacccagagttgttgttttgaagctatgaatttctgagcgtacacttgagattttgaggtgcttatgaattatttcatttccatgaatcagatgccttcttaatagtaatcacccctgatatttgtacagttttttacaaaatgccttcatgaattttttcttctattgataatcatcatagtagcccactttttttttaatatttcaacttttattttagatgcagagattacatgtgcaggtttgttacatgagtatattgcatgacactgaggtttggagtacaattgatctcattacccatgtagtaagcataggacccaataggtagtttttcagcccttgctcccctccctctctcactgctctggtagtcaccatcgtccactgttcccatctttatgtccatgtgtacccaatgtttagctctcagaagtgagaacatgtggtatttgattttccattgccgtgctaagtcccttaggatcatggccttcagctgcaaccagggtgttacagaaaacattatttttttatggctgtgtagtattctatggtatataagtgccaaattttctttatcctattcaatgttgattggcacctagactgattatatgcccttgctattgtgaatactgctttgatgaacatacaagtgcatgtgtctttttggcaaaatgatttattttcctttgggtatataccagtaataggatggctgggttgaacggtagttctgttttaagctctttaagaaatctccaaactgctttccacagtggctgaactaatttacattcccacaaacagtatataagtgtttccttttccccacagcctcaccaacatctgttattttttgacgttttagtaataggtattctgactggtgcgagatggtatctcattgtggttttgatttgcatttctctcacaatcagtgacattgggcattttttcatatgtatgttgaccacttgcgggtcgtcttttgagaagtgtctgctcatgtcctttgcccaatttttaacgggtttatttatttatttttgcttattgaattgtttaagttccttataaattctgaatattagatctttgccagacaaatagtttgataatattttctcccactctatcagccacttgtttagtctgttaatagtttttttttttaactgtgcagaagctctttagtttaattaggtctcacttgtcaatgttctttgttacaatttgtttttgttgcttttgaggacttcgacataaattctttgccaaggccaacatccagaatgatatttcatatgttctcttctaggatttctataatttgaggtcttacatttaaagttttattcaatcttgaattaatttttgtatatggtgaaatgtaagggtcaagtttcagtcttctgcatattgctagccagttatcccagcattgtttattgaatagggagacatttcttcatttcttatttttgtcaactttgtcaaagaagagatggctgtaggtatgtggctttatttctggattctctatcctgttccattggtcttatgtgtctgtttttgtcccagtaccatgcttctttggttattgtagccttatagtatagtttgaagttgggtaatgtgatgcctctggctttgttctttttgcttaggattactttggcaattcaggctcttttttgttccatatgaattttacaatagctttttctaattctgtgaaaactatgtttatagtttgatgtaagtagcattgaatctgtagattgcttttggcagtatggccattttagcaatattgattcttccgatccatgagcatggaatgcttttccatttgtttgtgtcatctatgatttctttcaccagtgttttgtagttttccttgtagagatcttttacctctttggttagatgtattcctaggcatttcattttttctagctgttgtaaatggggtcgttcttgatggagctctcactttgtatagaaatgctactgatttttgcacattgactttgtattcggaaactttgctgaagatcagttctaggagtctttcaccatagtctttagggttttctaggtatagaattatatcaacggcaaagagagacaatttgacttcttttcctatttggatgccttttatttctttctcttgcttgagtgctctggcgaggacttttagtactatattgaacaggaatggtgagagttgacatgcttgtcttattcctgctcttaagcagaatgcttccagcttttgcccattcagtatgatgttggctgtgggtttgtcatagatggctcttattattttcacgtatgttccttcactgcctagtttgttgagggtttttatcatgaagggatgttggatcttatcaaaaccttttttcctacgtctattgagatgatcatatggtttttgatatgtgtacgttgaaccaaccttgcttcccaggaataaagtgtacttgattgtaatagattaaattttgttgtgccactggatttgggttgctagtattttgttgaggatttttgcagctaacattttttcagtcttcaccatgtaccaggcaatggactcaacacttcccatgcaccaggtcctctaattcttctttgtcactatgaggcaaaggttgatactccttccattatgaatggcaaactaagccttggagaaattaaatattttgtccacagttattcagattatatgtggtagagttgagatttgaaagcagtgctaaagccagtatgctgcgtatagattttcagctacctgaagacagaggccattcttgacctttctttcattgacattttagtatgccctcctgacaataacttcttgcctaattcattcatggtatttaaaaagaatgtgaaataaaatagaaaaagcattgtaatatacaacatgtaaatatgtatacaacaagcaaaagaaatagggtactaaattgtacatagatcatgattacaaaatttttaaaaagaagagaaaagtatatgtagagtctagaaaaagatttatcaaaattctattgatggttatggaattttgaattcagttatgggttcttttttccttctttttatttttgtcatctgttttctatatttttcatttttaaataaaagtgatggtaacaaaagttttaaattaacagtaaagagggaaaaaatgagaaagttcttacattgtggttagcagtttttaagtatgaatcataaaaacatcccctgagggaccaacaatctatttaaagaggcaaagcgtgaagttacaggaggagcccaagggcacgtaggaacaagctactgtagcccacatccatagggaaagggagaagagaaggaggttttaattttttaagatgcatgtagaaacagaaactggcctaaggggcaaatgagtaaatgcatagaggtgggaatcagctagaagtgcatctgagagagaaatgggccattttgggggagagacgatgtttgaagggcaagattatgatgaaagccaccattttggggtcttgacaagatgaaggctgtggtaatcttctgaaggcaccttcagaaatagagtagtagcggatgttccagactctgggtgttgtggagcatcttgtttggttcctggttgcatgggaaggaaagcaaagcggaagatagttattcccacctctcatctcctctttctaacatatactacaaagtttctagactggcattcttcactgcagagccaactatattacttttctgctcaaaatccttcaatgattccccctgcctctccaggccagtgcaaagacttcagatgagcatttaaggcccttcacatcatggggccaactttgccagcattgtctccaattcctcccctatgcttccctaggctatagtcttattaaattacttggggtatccccctctatgtctgtgaaaaattcatcagctcccctctcttccctcaatactccttataccttcattcattcattcactcattcactcatttatacctagccctaggttatatttatttgtatacttttcttaccagcaacctagatggtactttggaagactgagatcaggttctatctgtccttatatcttaacatcaagcacaaaaactctgtgatcagtatatgtcctacaaatattttgctgagctgaagactaggatggctggtaaagacattgatagtaaggcaaaatttagaagtagagaccaaacaaaggaaaataacgagtttgactctggcttgcttaacatttaggaataataaatgacttttaaggcaaatatgggcttaattctactttgctaaagtctagatttctggaaaaaaattacttggtgaaattcgtaataaaaatgtgatggtgatgaataaggtttttgctcagatagcctcctatcctataccaggtatccattcacttatttatgtatttattcattcattcaataaacactatgtactattaaaatctagacactatggaaaatgctgaggaaatagcagaaatataaaggaaaataaagtttctcctctttgagaatttataatctactgggggtaaaaatcaagtttttaaaagggatggagataggttccattcccaacaatgaagcacttatttattttacatcactctctcactaaaaacaaatataaacactagaaaagacacaagagacatgtatttgagagtcctgaggcagtgtagatttgaggggccaagaaactggacagaagagaaacccatggaggtgcttaagacattctgtgcagattttccactcaagggaattcctcaaggctgattcctaaaatagtgtggatagaaaggctgggaagcctagtttaaaaaaatagctactaagaaacagaaactgagcagagcttttggtggtctcatggggctggggagaaaaactgaagttcagggctattgagagagcaaaggataaagactcataggtgcatcagagaagacaagtagtccaacagtatgagtggcttatcatctcaaggcgtttgctaattagcaaaagcagcatagagagaaactgaacaaaaacctagagctaagaaattatgaaaataaacacagcatttgaggttctcacaaataaaaattggcattgaagacttgtcaaggaagaacacccctcgtgaacactcaggttttcagttagggtccttttaggactatacccaaggagtaaaggaaatcagaaatggataggggctttaaagacatttgaagaaattcatcctctaaatagcttaatcctaattggattcaggagacttctccccttataaccacttgctagaagctaaagactcatgtaaaaaccttcataatcttcattacacattgtctactatttaataaaaaattaacaagcataccaagaggtggaactaagaaagagataataaaaatagacctataggtgatccagacattgtagtcattacataggcattaaaataactataatgaacctgtttaagacaacagatacagtgattttcaaagaactggaatttgaactgatctttgaagaatactttgaatttcaactaaccaagtactgactttacaaagaacttagctttcagatgcagtccattctagccaagggtggatctcagggatgaggatcaaaggaagaaagggtggggcccatgatcacaggtaaagagaagagagtttgagtagaactgggcaggaagagaggacaagcatggcctcccttccacatataaaaaataggaaatcaagagggttttcctgttgattaaatattcctgattgatcaggactagatcaaatgcaggaggaaaaacaattcattgacgtttatctattttaggatttcttcagtaaatctgacccatttctggaaatttttcgtatgaatgatgatgcaactcagcagctggtgcaccgaactgaggtaagagtcatcttcagctatgccctcttatctcctaagatgatgataaattgacctattttgagaaactcctttttgtgtgtgtgtgtgtgtgttgaggtggagtctcgctgtgtcacccaggctggagtgcagtggcgcagtctcggctcactgcaaccgccacctcccagcttcaaacaattctctgcctcagcctcctgagtagctgggactacaggcacccaccaccacgccgagctaatttttgtatttttagtagagatggggtttcaccatcttggccaggctggtcttgaactcctgacctcatgatccacccgcctcggcctcccaaagtgctgggattacaggcgtgagccaccgcgcccagcctccttttacttcttaatgtctgtagatatcaactaaggcctgaaatcttcagtgtcctcaagaaggttctgccatttttagcttttttttttttcacttttaatcctcaatttagttgtcagaagagcctttctaaccccaatttctattgttaactttcaaaacagacaattagcaacttattcataataaaagtataaatactagctatcatttaatgaggatgtttaggcatctaggtgccaagcattagactgttatttacatgcataattttatttctcacaaaaattcctcacacatgatgatgatgatgatgacccccattttacagttgaagaaactgaactttaaggaggttaagtaactttcccaggtctcacagctaacaaaggatggaactcaggtttcaattgaggttgtttgactctgagcttcatggtaatttgggaagtcaatctgcttccccagggaaagtacatacattgcactgatgtcagtcctatcatatgaacacctgacctttcttagcagccacttagtctagttgtatctccttctcactcttcctcttctttctccaagtggccccaactttatctcttattaccttaccccctactacccactaccacacacacattcaacaactaaccacgatctccatttttcattttattttacttgtaagccagtccaagagggattttgtaggagtgaggtacattgataagaaggaagtgatatacttgtgctgaattacttggagctgagagaagacccagttatgcttgcataccatttgcagagtgaaaataaaaaagaaacccccatgactttcataaggtggtggtgtggttgctatatccccaaaacatcacattggaaattcaatttcctgaagtgacagagttgcaggtgttgttaggggaatgtttcatgtcattgttatgatagacaaaaattaaatagccttggatgggctagctgtggatatcatctgatacaaagttgatatctaaaaaaagtgtttaataaaagaataaataaataaatgctgttaaatataaatagtatgtctattgcatgctatagaacaatgtaattctttggaacttaatccatgaagaataaattgaggtgcagctagcacagttgccctgagtggcatctcattaccaccaccaaaagaggtctttcacccgttaagtttccttatgtgaaacaaacttcttttgagggaaatagagcaagatggccaaatagaagcctccactaatcatcctctaattatcctacccataagaacaccaaattaaacaactctccacacacacacaaaaagcactttcataagaaccaaacatcaggtgaatgaccacagtacttggttttaacatcgttatcactgagagagacactgaagagggtaggaaagacagtcttgaattgttgatactactcctccctcatccgcttggtagtggctgtgtggtgcagatacagaatctgtgtgcttggggaagagacagtgattatgggaccttgcactggaactcagtgctgccccatcacagcagaaagcaatactgggcataactcatcctgcacccatggaggaagaatttaaaccagtcctagccagagggaatcactcacatcagtagtagaaacctgagttctggcaatctttgccactgcaggctgaagggctctggggtcctaaataaatttgaaaggcactctaagccacaaatactgcaattcctgggcaagtactggtgctctgctggactcatagccagtgggctatgagggtatacaacctagtgagacaccagccaaagtcaccaagggaatgcctgcaccacccctcaggtgcatgcaccaccaaggaatgcgtgccccataccctaagcagtgcagcacatggctccaggagacactcctccctcccacttgaggagaggagaggaaagcataaatataactttgtcttgcaacttggataccatctcagccacaatagaatagggcaccaggcagagtcctgaggtccccattccaggccgtagctccgagacgacatttctagacaaaccctgggccaaaaggaagcctactgccttgaagggaagcaggatccattaccttctgaataaaaatctcttggtccccaaataatcagcagttgtagccaggctgtactcaccatgggccttgggtgaaacacagagacatggtggctttagatgtgatgcagtgcattcccagctatggtggctattgggagatattctgcttgagcaaaggacagggacaagtagaggggacttgattttgcaacttaggtaccagctcagccacagtgagatagagcagcaattgggctcttggggtccccgattaaagactttggctcttgcacagcatttctggactggctttgggtaagagaggagtccacttccctgaagagagagtcctatgcctgggagcattcaccacaagctgactagtgaatatttgggccttgagtgaacgttggtggtaggcaggcagtacttgctgtggtcctagggtggtggtggccaagggagaggctcctctgcttgtggaaaggggagggaagagtgggaaaaactttgtcttatggcttgggtactagctcaaacacagtagaatagagcatgaggtagagtcctaaggtttccgactccaagctctggctcccagatggcatttctggacctgcctgggactgggaggaactcactaacctgaagggaaggacatagcctggctgactttgccatctcctgattgtagagtactagagccttgtgtgaacataggtagtagccaagcacggttatcctaggccttgggtgagactcagtgctatgctggcttcacatctgacccagtgcagtccagtggtggcagccacagtggtgctcgtgtcaccccacctttaactccaggcagctcattacagacagactccattggtttgggagaaagtaaaggaagaggagaagggtttccacctggtaatccagggaattcttccagatcttatccaagaccaccactgtacctctacaagtctgaaagagcccagcatcactgagcttgggatgccccctaatgcagatacagtcacagtgaccaaaaacagaccacgacacccaaatccctttgaatacctggaaagccttcccaagaaggatggtacaaacaagcccaggctgcaaagactacagtaaatatataaatcttcaatatccagatatactggtgaatatctacaagcatcaggaccattcatgaaaacatgccctcaacaaacaaactaaataaagcaccagagaccaatcctggaacaaaagagttatgtgacctttcagatagaggattcaaaatagctattttgaggaaacttgaggaaattcaagataacacagagaaggaattcagaagcctatcaaataaatttaacaaagagattgaaataattgtaagaaatcaagcagaaattctggagttgaaaaatgcaaatgacacactatataaggtatcaaattatcctaacagcagaattgatcaagcagaagaaagaattagcttgaagataggctatttgaaaacagaccatcagaagagataagagaaaaaagaatgtttaaaaatgaagcatgcctacaagatcaggaaaatagcctcaaaaggacaaatctaagagttattggccataaagtataaggagaaaaagagataagggtggaaagtttattcaaagggataataagagagaacttcccaaacttagaaaaagatatcaacattcaagtacaagaaggttatagaacaccaaacagatataacccaaataagatgacttcaagacagttaataatcaaacccccaaaggtctaaagaaaatatcctaaaaggaataagagaaaagaaaaacaaattacgtacaatacagctctaatacatctgacgcagaattctcagtagaaaccttaaagaccgggggagagtggtgtaacatatttaaagtgctgaaggaaaaaacttgtatcctagaatggcatatccagcaaaaatattcttaattatgaaagagaaataaagactttcctagacaaacaaaagctgagggatttcattaacaccagaactgtaaaggaagttcttcaatctgaaacaacacaacattaatgagcaataagaaatcatctgaaggttcaaaactcactggtaatagcaaatacacagaaaaacacagaatattataatgctctaattgtggtgtgtaaactaccaatattttgagtagaaagggtaaaagataaactggtcgcatgtttatagcagcacaatttgcaattgcaaaaatatggaaacagcccaaatgtctatcagtcaatgagtggataaagaaattgtggtatttatataccatggaatactacttagccataaaaaggaatgaattaatggcattcacagcaacctggatggaactggagattattattctaagtgaagtaactcaggaatggaaaaccaaatattatatgttctcacttacaggtggtagctaagctaagatacaaaggcataagaatgatgctatggactgtggggacgcaggggaaagggtgggagggggttgagcgataaaagactacaaactgagtgcagtgtatactgctcaggtgatgggtgcaccaaatctcacaaatcaccactaaagaacttactcatgtaaccaaataccacctgcccccaaaaacctatagaaataaaaaaattaaataaataaaatacatttctgtggggaaaagaagacataacactcccttagaaagaaagtataatgaaatacttttatttttctatttattttctttctatgaaaggaaattaaaaaatattaactacaacaacttttcaagacagagtcattaaaataatatataaacagaaacaaaaagttaaaaagctgggggacaaagttaaagtgtagtgtttttattaattttttctttgcttgtttgttagtttgtctgtttctttatgtaatcagtgttgagttgttgtcagttgaaaataatgggttttggtacgtagtcttcaaaagacacatctcacatgcaaggtctcttgacacatataggctcaaaataaagggatggaggaaaatttaccaagcaaaaggaaaaaaaaaaaaaagcaggggttgcaatcctagtttccaacaaaacagactttaaaccaacaaagatcaaaaaaggcaaagaaagccattacataatggtaaaagttttaattcagcaagaagagctaactatcctaaatatgtatgcacccaacataggagcaccctgattcatatagcaagtttttagagaccttcaaagagatttagacccccacacaataatagtgggagactttaacaccccacagacaatattaacaaattatcaagacagaaaattaacaaagatattcaggacctgaactcagcactggatcaaatggacctgatagatatctacagaactctccatgcaaaacaatagaatatacattcttctcaccaccacatggcacttactctaaaattaatcacataatctcaagcaaaatactcgtcagcaaatgagaaagcactgaaatcataaaaacagcttcttggaccacagcacaatcaaatcagaactcaagactaagaaatccactcaaaaccatacaattacataaaaattgaataacctgttcctgaatgattttggggtaaataatgaaattaaggcagaaatcagggagttctttgaaactaatgagcacaaagacacaacgtaccacaatctctgggacacagttaaagcagtattaagagggaaatttatagcactaaaatgcccaatcaaaaagctagaaagatctcaagttaacaacctaacatcacaactgaaagaacttgagaaccaagaccaaacaaatcccaaagctagcagaagacaagaaataaccaaaatcaaagctgaactgaaggagatagagagacaaaaaaccattcaaaagattgatgaatccaggagcaggtttttttttaataatattatagtagaccactagctatactaataaagaagaaaagggagaagattcaaataaacacaatcagagataataagagggatattaccactgaccccacagaactacaaacaaccatcagagaatgttataaacaccgctatgcacataaactaggaaatctagaagaaatgaataaattcctggacagatagatacactctctcaagacagaactaggaagaaatagaatctctgaacagaccaataacgagttttgaaatagaggcagtaataaatagcctaccaaccaaccaaagcccaggaccagacagattcaaagcttaattctaccagatacacaaaaaatagttggtaccattactactgaaactatttcaaaaaattggagggactcctccctaactcattctatggggccagcatcatcctgataacaaaagctggcacagacacaacaacaaaaaaagaaaacttcagcgtaatatccttgatgaacactgatgcaaaaatcttcagcaaaatactggcaaaccaaatccagcaacacatcaaaaagcttatccaccatgaggcttcatccccaggatgcaaggttggttcaatgtaggcaaatcaataaatgtgattcatcacataaacagaacaaaagacaaaaaccacaagattacctcaatagatgcagaaaaggctttcaacaacatttaacattccttaatgttaaaaactcccaataaactgtgtattgaaggaacatacctcaaaataataagagccatatatgacaaacccacagacaacatcatactgaatgggaaaaagctggaagtattccccttgaaaactgccacaaaacaaagatgccctctctcaccactcctattcaacataatattggaagttcttgacagagcaatcaggcgagagaaagaaataaagggcattcaaataggaagagaggaagtctaactatccctgtttgcagatgacatgatcctatatctagaaaaccccatcgtctcagcccgaaagcttcttaagctaataaacaacttcagtaaagtctcagaatacaaaatcaatgtgcaaaaattgctggcattcttatacaccaacaacaatcaagccaagagccaaatcatgaatgaactcccattcacaattgctactaaaaaaaaagagtgacatgcctagaaatacagctaacaaggaaactgaaagatctaccaagagaactacaaaccactactcaaagagatcagagatgacacaaagaaatggcaaattattccatgctcatgcataggaataatcagtatcattaaaatgggcatattcccaaagcaatttatacattcaatgctattcctattaatctaccactgacattcttcacagaactagaaaaatctattttaaaatttgtatgaaacccaaaaagagcccaaataaccaaggcaatccaaagcaaaaagaacaaagctggaggcatcacgctacctgatttcaaactatattacatggctacagtcaccaaaacagcatggtactggtataagaacagacacatagaccaatggaacagaatagagaactcagaaatatgaccacccaccttcaactatctgatcttcaacaaacctgacaaaaacaagcaatggggaaaggactccctattcaataaattgtgctgggataactggctagtcatatgcagaagattgaaactggaccccatctttacaccataaagaaaaattaactcaagatggattaaagactcaaatgtaaaacccaaaactataaaaaccctggaagacaacctaggcaataccatttaggacataagcatgggcaaagatttcataataaagatgccaaaagcaattgcaacaaaagcaaaaattgacaaatgggatctaattaaactaaagagctcctatgcagcaaaagaaactatcaacagagtaaacagacaacctagagaatgggagaaaatttttgcaaactatgcatctgaatgaggtctaatatccagcgtctataaggaacttaaacaaatttacaagaaaaaaactcattaaaaagtgggcaaaggtaccctgaaacttaaagtataataataataaataaataaataaaaaagtgggcaaagaacatgaacagacacctcttaaaagaagacatacatgtggccaacaatcatatgaaaaaaagctcaacatcattgatcattagagaaatgcaaattaaaaccacaatgagataccatctcacaccagtcagaatggctactataaaaagtaaaaaaaaaaacagatgccggagaggtagtggagaaaaaggaatgcttttacactgttggtgggagtgtaaattagttcaaccatcgtggaagacagtgtggtgattcctcaaaaacctcgagacagaactatcattcaacccaataatctcattactggatatatacccaaaggaatataagtcattgttataaacatacatgcacacgtatgttcactgcagcactattcacaataacaaaaacatggaatcaacccaaatgcccatcaattatagactggataaagaaaatgtggtacatatacaccacggaatactatgcagccataaaaaagaatgagatcatgtttttgcaaggacatggatggagctaggggccattattcttagtaaactaatgcatgaacagaagaccaaatacagcatgttctcacttataagtgggagctaaattatgagaacacacggacatatagagggaaacaacacacactggggcctatcagagggcagaaggtggtaggagggagagaagtaggaaaaataactattggatactaggcttaatacctgggtgatgaaataatctatacaaccaacccccattcaacgcatttacttatgtaacaaacctgcacatcctgcatatgtacccctgaaactagaagttaaaaataaataaataaaataatgggccagcctcagtggctcacacatgtaatcccaggactttggggggccaaagcaggcagatcacttgagaccaggagttggacaccagcctggccaacatggtaaaaccccatctctagtaaaaatacaaaaaatagccaggcattgtggtgtgtgcctgtaatcccagctactaggaaggaggctgaaggagcagaattgcttgaacctacgaggtggaggttgcagtgagctaaggttgtaccactgcattccagcctggacaacagaatgagactccatctcaaataataataataataataataataataataataataataataataataataataggttataacataatatttgcaagcctcatggtaacctcaaattgaaaaacaacagatacaccaaaaaaaacccaataaatttaaaaaaacataaaccagagaaaaattaccttcactataaggaacacaggaaggaaggaaagaagaagaaggaagagaagaccacaaaacaaccagaaaacaaaaaccctaatggcaggagtaaccccttacctatcgataataacattgaatgtaatgggactaaacactccaataaaaagacagggtttccgaatggataaaaacaagatccagtgatatttagactacaaaaaatacactttacctataaagagacagactaaaaataaaaggatggaaaaatatatcccatgcaaatagaaaccaaaaaagagaaggagtaactatacttacatcagacaaaatagatttcaagacaaaaacaatgaaaagagaaaaaaattatataatgatcaaggggttaattcagcgagagaatatagcagttgtaaatacatgtgcacccaatactgaagcactcagatatataaagaaaatattattagagctaaggagagagatagacctcaatacaataatagctggagacttcaacaccccattttcagcattggatagatcatccagtcagaaaatcaacaaagaaaccttggacttcatctacaccataggccaaatggacctaatagatatttacagaacatttcaactaatgactgcagaatatgcattcttctcttcagcacatggaccattctcaaggatagaccatgtatttgatcacaaaactactcttaaaatattcagaaaaactgaaataatatcaagtatcatatctgatgacaatggcataaaactagaaatcaataacaagagggattttggaaactgtacaaatacatggaaatcaagcaatatgctcctgaatgaccagtggatcaatgaagaaattaagaaggaaatgtaaacatttcttaaaacaaatgaatatgaaaataaaacataccaaaacctatggaatatatgaaaacagtacttaaaagaaagttgatagctacaaatgcctatatcagacaagtagataagtttcaaataaacaacctaaaatgtatctcaaagaaccagaaaaggaagagccaaaaaactccaaaattagtagaagaaactaaataataatgattatatcagaaataaatgaaatttaaatgaagaaaataataaaaaaatcaataaaacaaaaagttagttttttgaaaagataaagaaaattgataaaactttagccagattaagaaaaaaagacagaatacccaaataaataaaattaaatctgaagacattataacaaatactgcagaaaattagtggatcattgaggttactatgagcaactatatgccaataaattggaaaacctggaagaaatggataaactcttacacccatacaatctaccaagattgaaccataaagaaagccaaaacttgaacagatcaatatcaaataacaagatcaaagtcatgataaaatgtctcctggcaaagaaaagcctggaaactgatggcttcactgctgaattctaccaaacatattggtagaattttaaaaagaactaataccaatcctacctgaactattttaaaaaaggaggaaggaatacttccaaactcattctatgaggctagtattgccctgataccaaaaccatacaaagatacatcaaaaaaagaaaactacaggccaatatccctgatgaacattgatacaaaaatcctcattgaaatcctagcaaacttaattcaacaacacatgaaaaagatcatgcaccatgaccaagagggatttatcccagggatgcaagaatggtttaacatatgcaaatcaatcaatgtgatacatcataccaacagaatgaaggacaaaaatcatatgctcatttcaattaatactgaagaagcatttgatacaattcaacatcccttcatgataaaaaaaaatgcaaaaaactgagtatagaagaaacatacgtcaacacaacaaaagccatatacaacagcccacagctagtatcatgctgaattgggaaaaactgaaagcctttcctctaagatctggaaaaagacaaggatgcccactttcatcactgttattcaacatggaaatggaagtcctagctggagcaatcatagaagagaaagaaataaagggcattcaaattgaaaaggaagaagtcaatttatacttgtttgcagatgatataatcttatatttggaaaaacctaaagactctacaagaaaactgttagaactaataaactcagcaaagttgcagatacaaaatcaacataaaaaatcagtggcatttctatattccagcagcaatctgaaaaagaaatcatgaaaataatcccatttataatagctacaaataaaaggaattcacttaccaaaaaagtgaaagatctctacaatgaaaacagtaaaatattgatgaaagaaactgaagaggacacaatacaatggaaaaatagtccatgttcagggattagaaaaattaatattattaaaatgtgcatactacccaaagcaatctacagattcaatgcaatctttatcaaaataccaatgacattcttcacagaactagaaaacacaatcctaaaatttatatgaaactatgaaagacccagaatagccgaagctatcctaagcaaaaagaacaaaactggaggaatcacattacctgacttcaatttatactacaaagtgacagtaaacagcacggtactggcataaaaacagacacataaacccatggaacagaatagagaacccagaaacaaattcatacacatgcattgagttcatttttgacaaaggtgccaagaacagacattatggaaaggatagtctcttgaataaatggtgctgggaaaactggatatcaatatgtggaagaatgaaactagacccccatctcttaccatatacaaaaatcaaatcaaaatggattaaagacataaatttaagacttcgaactgtgaaaatactaaaagaaaacattagggaaactctctaagtcattggactgggtaaagatttcttgaataataccccacaagcacaagcaaccaaccaaaaatggacaaaggggatcacatcaagttaaaaaaaaattctgcactgcagaggaagcaataaaaaaagtgaagagaaaacccacagaatgagagaaaatatttgccaactatccatctgacagggggttaataaccaaaagatataaggagctcaaacaactctatgagaaaaaaaatctaataattcaatttggaaatgggcaaaagatatgaataaacatttctcaaaagaagacatacagatggcaaatagatatgtgaaaaggtgctcaacatcattgatcatcagagatatgcaaaaaaaaactgcaatgagatagcactcacctcagttaatattaacttttttggataaattcaaaaggccataataaatactggcaaggatgcggagaaaagggaactgtcatatactgttggtggaaatgtaaattagtataatcattgtggagaatagtttggaggttcctcaaaaaattaaaaatagaacaaccatatgacccagcaatcacactgctaggtatatacccaaaagaaaggaaatcagtatatacaggagatatctgccctcccatatttattgcagcactattcataatagctaagatttggaagcaacctacaagtctatcaatagatgaatgaataaagaaaatgtggcacatatacacagtggagtactattccgtactctaaaaagtacaaataaaattctgtcatttgtgacaacatggataaaactggaggtctttatattaagtaaaataagctaagtacagaaggacaaacttcacatgttctcacttatttgtgggagctaaatattaaatataaaaacaactgaactcatggagatagaaaatacaatgatggacagcagaggctgcgaagggtagtaggggaggagggaagtaataatggttaatgagtacaaaatatctagttagaatgaataagatctagtatttgacagaacaatatggtgactacagtcaacaataatttattacatattttataataaccaaaacagtataagtggaatgtttctaacataaaggataaattcttgaggtaacagcccaaaaaataaaaaattgaaaggatgactattgctgtacttttcttccagaacctcctctcctctgctcctgagagcattcttctcattgatattggtaaattctcctgttcccaagaatttctataatatccccttttactctaatggggaggtgctcctagagtttcacaaggaacatgatggcaaggttttccgatgagtgaagcaacatgacattgatttctcttgctttctcagtagatacaaaataaataccaggcaaaactgctcacttgtgggtagcctgcacgtacacacacacacacacacacacacacatgtgtacactcatacatacatacacataaagattttaacttcagaggaaatttctagttgctattgagtttttcaaaactgttgcatgagacttcttcactttttagcattttcatataaagttgggaaatttattttaacccaaacaattttttacctaattctccttcttgctatcattttaatcatcctaagtgtactagaacacatgacaaagtcacacagaaacattatttctccacttcaatgcattagaagaaatttaacaatgagtctaggatctagttatattaaggaatccggtggaagagggaatcacttataaaagaattatgttatttggatagataattaattaaaaaacaaattctaggtcgggtgctgtggctcacgcttgtaatcccagcactctgggaggccgaggtgggcggatcacccgaggtcagtagttcaagaccagcctgaccaacatggagaaaccctgtctctactaaaaatacaaaattagctgggtgtggtggcacatgcctgtaatcccagccacttgggaggctgatgcaggagaggttgtagtgagccaagattgcaccattgcactacagcctgggcaacaaaagcaaaaatccatctcaaaaaaaaaaaacaaaaaattccaagacttccactaactaaagacttcctaagtagaaaaatcaatatgacagaattccatttaactttatttgtatatcccctagagcagtggttctgaaactttgtgcctcagaatcacccaggagacccacctccagagtgtctgtcggtagttctgggtggggactagaaatttgtgtttttaagaagtttccaggtgatgcagctcctgctggtccaggaaccacactttgggaatccctgccctcaagtacacagtacaatgctaggcacagagcagctactcatacattctgaaccaaattgaattatttgaaccatagttatggcaagataagatttgactcatatagattcttaggccaggattagccaagtttgtgattagtaaagtggttttaaaagggttttcctatgttatagacatagtttataatcttaagatctgccttgtcacgcctttccaggatattgtaattgagttggtgataagctagtataagtatggtcctgggatttttcttctagaaacttctcttctgacttgcaatctgatgtgactcaaggtcacagattaccagaccatccaattatttagcagcagagttgtcttgctatacccttcaccccactaagagtctttacctttgctgaccccaagagaagagaatttatactgtaagactgacagtcctacagaactgagaattctctatcaatgggcaaaggcagccctatccttaatttcaactccttttgatatagaagggatcattctcagcatccacatgctggaaaatattattggcattattcatgaaacaacagccaggacagtgaccacaggagttctgtgcataatgacctgcttagtgggtacccttaaaagatttactacatcaagtttttattaaggcacctcttccaggctattgttcttttcataagcatcacaatggtttctcaagcagttttaatgtggaaatgtgaaaatgtcaagcatttctcccccactcaccactcctctctttcttttcccaggttgtgatgaataacttaagcccagcctggaaatcattcaaagtatctgtaaattctctatgcagcggagacccagaccgccggctaaaggtcagaaatctgtgtccaagaaatgtgattttttaaaaaaagtatttaatcttcctatttcttttcaaaataatattgacaaaccccaaattttctttacactgtacccaaccctctcatcttttagcatctcgatggaagaaacaagggctatttcttcttctagagccattgaagcttatatgaaagcccaaaatcaattccaattatgttatatcaagaggcaaaacccatgtcttctgaaagacaaaaccatggcaataaattcaggttataaatgagagttattaaaatgaaaatagtgtcatatcaattatctactgttatataacagaataatgcaaaatttagtagcttagaactagaagcatttatttagcttatgattctgagtactgacaagttgggatgaactaatctaggtgattcttctgttgatcttgcctggactttctcaggcatttgtggtcagctacccaagaggagggtggttctgcttctggaggttggctggctgtggtctggaatgagaggaggggtggggccatatggctctcatcatccccaggccagcttggactaacacacacagtgaacttagggttcgaagaatgcaagaacagagccccataagacctctttagggcctaggctcagaactcacacaggtcacttcctccacagtctaggtcaaagcaagtcacatggtcattacagatttaaaaggtaaggagatagactacatctcttggtggaagaagctccaaagtatcgtggccactttttcgatctatcacgaaggctttctgagcaccttgggaatgtaaaagttggaagaaaatatgcattcaaagtcaccaaaggaagacagtaggctgaacgccaggagcagatttcaggagatgtttttataggccatgctctggcctttcctctaccttgaaagtctagacgttccttgttgtcaatggcccggaggtgattcaaccaattaaggataactaagcaaatctactggagactggtgcctataaactaaaaggccaattgattaatgttcagtgaaaaacacaaccatcaagcagtaatatcagcttcaccagggcattttcttgtgggcaaaccacagagaagacaatcatcagaaggttgctgttattgcctgaaatcagaattgggtaactgagacagttaatggcttcagactctgaaaaccaggagtgcccacctccactgtccatcaggcagactaaacattcatgttgacttctcaggacaactaatcccctggaaagtgttagctgggtagctggacattgatgatgtttgccttagtagttttacattttcctcactacttttgccccacaaaccttctgacagatacaattttttgattcatcgatatgatctgtcaggttagaatcccatctgattggttaatcccaagctctttaaggttgctttatatgtctttgcttaaatccattctgtatgagctttgcagttgaactcttagcagacatgttcacttccatgttcttgaggagcaactcagagttgcacctggtatctctgtaagaactgagatatttcaagcctcaaccccactggaaaccttcaagccaaaatcaggattcctggctatttggcccttcatgtggaagctcctatgcagaatggccaagagctgtgacttcaggcataggatggcaattatcacttacacgttgagtagcaccctcctattcccagggaggtaaatgaccctctttggccagaaataaaataatacctcctttagccatatatctactttttatgaggagtcattaaactttttatgaggaggataaaaggagagggtcatctgtaattgaataaataaaaatgcagaaaaggaacactttgtggctttctgagtgctctgctgcctgtagagaaataagtaggaggtaaggaaatagatgattgattgatagatgatagaggagagaaagaaagaatgtgagaaggaagaatagaggaaaagaaggaaaaaaagaagaaaggaaagaaaaaggaaggaagggaggggggagagaaggatcagggtttctccacacgtgcactattgacgtttggattttcctgtggggagctgtcctgtgcctgtaggatccttaacagcaaccctagctactagatgccagtagcatttcacccccgtcacatacacactcacacaccctgctgcctgtgtcagtctgaaaatcaaaagtgtattcagacattgccaaatgttctctagagtgtaaaatcacttccagttaagaaccactggtatagtacatcaaacttattatacattagagtcacctgggagccttgttaaactcctcaagaacctatgaaaatgttttaatttctttcaaaatcagaagaagagaatgaacatgtaagattaactaaaatattctaatttttttttcttgcatcagaaagcaacgaactttttagggtccatgaaaatctgttgtgttaaaaggggcccatgaaggcaaaagtgccaatgaaagtcacactgtgttcctatcccaaacatcttgtcatctcatcagaaaatacttcagtatgtattgctaacattgctaacagataataaatctttccattaataaaactataaaacattattcttaagaatgctaactatacttccttaatgccaccaaatattctgccattgtttatgtttgccagagtctctcatttattaaacaattgtttctatttgtttaagtgaagatttaaacaaggtctaagcactgtatttgactgagatgtctctgaagcctcctttaatcagttcgttctcgctccccttttttttccccctgtaatttacttagtgaagaaaccaggctggtttgtcccatagcatttctcacattctgtgtttcctataaatgcatatttagaacttgatcagatttcagggtctgttttctggcaagaatgccccagtattattaacaatttatggattttttaaatatatttcagtgtttccatctatttcagttattataattcctttgaaatcttaagttgtcccatatttggccaataaaagcttcttcaagttggctcttgaattcttttgatataaacttagtaacgtccttgcttgataacgtccttgctttctggaatgaattcttgacctaaatcaattttgaaattttacaattctttttcttcattacatatgtatttctatggatgcagagccatattttaatgtctctcaaaatcattcctctccatagtatttaaggtctctgtggacctatagcccatggaacagtcaggttcatttgtttcattttgttttcaatttttagatattttttcaaatttaattttgccttataattatattaaatgtttacatggttccaaagtcaaaactgcaaaacagggaatattcagaaaagattaacttccattcctgtctcttctaccttttaccttcattttgtagcatattttgtatgctacgttttgtagcatattttaatacctggtacagctagccatacccacttccgtattccttgccttcttaagggttttcctggatattttacctgtttttttcattgagctttataaacaacttatctaataccagaaaaaaacccaaaacttgataatattttattgagattgcatttaacttgtgaattaggcagaattttctctttataatattgaatcttcctatcctagaatatggcatgtcttttcattcattcaagtctccttttgtgttttgcaggagtgcttaatattttttctcttattttctatgtacctcttagaacctctattgtttgcataaatgaaggtcattgaattttttcttaaactaatatttgttctcttattgtttatagtgattttcccattaactttttttctttttctcttttctttctgttttttgtttgtttgtttgtttgtttgtttgtttgtttttgagatggactcttgctctgttgcccaggctggattgcagtggcgcaatctaggctcactacaacctctgcctcccaggttcaagtgatttccctgccttggcctcctgagtagctatgattacaggcgtgtgccaccatacccagctaatttttatatttttagtagagacagggtttcaccatgttggccaggctggtctcaaacacctgacctcaagtgatctgcccaccatggtctcccaaagtgctgggattataggtgcccagcatgtttttttccaaatatgtaatcatactacttgaaaatggagatagtttttatccttacccctttttttcttctaataccctcaatgtgatagatggcagtggaggtagagggcctccttgtcttattcatgaacatagtagaaaattctatagtgtttccccattaattctggcagagattaatttttctgtagagacagagtcttgctatgttgcccaggctggtctcgaactcctgggctcaagcagtcctctccctcagccttctaaagtgctgggattacatgcgtgagccaatgcacctggctgggattcattttttaatgtaactctaaaggtatcagacactcagtgctttctcagccatgtctactgagccttaattacctatgatattcaatacaattaaataccttaaatattcagatcatatttttactagttatggtaacccaagagataacaccacaacatgctaaaatgtcttctgaactgcataaaggcattacactactactttctatggcatcctagacatgccatattctaggatagactcaatatatattatttctaaagcatattagagtttataaggcccttataaatatcataatttcatttacttctaaccacattgtgaggtaggttccattatcttcattttacagatgaggaaactgagactcaaaaacccatgttgttaaacatcaaattcaatgttgttttaatcagattgcactgcctctattttattgtattatacttattagaaaagaaatcatcctgataagcctatttcttgaccttttcaaccagaatgatttatttaccattatgctaatatttaacagaagatttgtctatatgtaacatttcataaggtctgagacactaaaggaaagtctctcaataaaactataacacaatgcttacttatcaatgtatgatttataagaaaataaattactctcccagaaatatgtacctcttagattctaggaaatatggcattaatcattttatttgatttgatcaacatattgttaatacccagaacatattctttaggaggcaatgttgatgttcagaatagattcttccagagagtgttcttagagaagaaaatggtgagagggtactatcagcaagtatttattcataacccaattatgcctagcactgtggaaaactgtcatgccagaacaatcttgacaaacaccatataagcaccctgagaccatttaatcacatgtattatggggccattttctatctctttctctaatttccaaaccacacaagtaacatggatactttcccctacacaaagttcatcaagcatcatcagagtatggttgataggagctatttgccttgaaggggaaaactaaggtgatagcaccagttgttctggatcaattcgcccccatgccttatgtaggagagaggcccaggttattaactgagcccatggtgcagtaaaggaaatggcagaagagaagaagaagcaggtccccaaagtcaaagtagaagggagtaagacccaggaacccactaaggggtgaaaggaggcccaaatacaagtctaaagcaacccctgaatgacatttcacccatgattcatctcgcttgttctttgcgccgtctatcttaggctgccatgcctggttgatttaaaacagccatgttcttgagttgccttctgacacccccaaagctggattcctggacaatcagaaaagtgctctgttaaatcagaatcccacactcagtggtcctggagtcttcattttaacaattttcataaacaatgctggtacaggccatttgccaaacacacattgagaaatactgtctttttttttcctttaagttttttactttattattttttttaatttacgtttttttactttaagttctaggatacatgtgcaaaatatgtaggtttgttatgtaggtatacacgggctatggtggtttgctgcatttatcaacccatcatctgggttttcagtcccacatgcattaggtatttgtcctgatgctctccctccccttgcctcccaccccctgacaggccccgatgtatgatgttcccctccctgtgtccatgtcttctcatttttccactccgacttatgagtgagaacatgtggtgtttggttttctattcatgtgttagtttgctgaggatgatggcttccagcttcatccatgtgcctgcaaaggacatgaactcattcttctttatggctgcatagtattccatggtgtatatgtgccacattttctttatccagtctatcattaatgggcatttgggttggttccaagtctttgctattataaatagtactgtgataaacatacgtgtgcatgtgtctttatagtagaatgatttataatcctttgggtatatacctgtaacaggattgctgggtcaaatggtatttctggttctagatccttgaggaatcaccacactgtcttccacaatggttgaactaatttacactcccaccaacagtgtaaaagtgttcctatttctccaagcctcaccagcatctgttgtttcccgactttttaataatcaacattctaactggtgtgagatggtatctcattgtggttttgatttgtatttctctaatgaccagtgatgatgagcttttcttcatatgttttttggctgcataaatgtcttctttggagaagtgcctgttcatatccttcacccagttttgatggggttgtttttttcttgtaaatttgtttaagttccttatagattccagatattagacctttgtcaaatggatagattgcaaaaagagaaatactgtctttctactgattctccaaacctagctgactcactacaggtaccacccttatgtagttcagcacggtttctgatgccttactgtgaggctgagtgtatatgtatatgtgtatgtgtatggatacattctgttcttcctcctataagaaatccttaacacctgttttttgattacatccaactattcatatctttcttatttcatgtgtgaccaggccatcttcaattgaaattgtattttctccacaaattcactgtctttgctttggcctctctgagccagactgacacactactgccaaatggatttgagtccactcatagagtttgcctcggaacttccccctttattcccagcctcatgtgactcttaacccctgggtccctacttgcctcttattttgcctctaatcttttagaattaattgcatgtttgttttctttctgtttcaagctgatttttttctagcaaaccttctagctcttactgcttggaaaggaaaagacaagttccaacccccagatctgaatccttggcattgatcccaattcagccccataattcccccaaacccatagaaagggctttaatcattagatatgaattacatcaacatttcacgattattggtgcaaaacacaggcagttggaattgaggagtccactgctatgttcagcattgttggaaacacctgcaacaaagaacctggcatttctaggcaactgaaagcaatttcaccgtcctctctatgtgccttatatttgtaacaggaaaaaaaaaatccttggatagctcatggtcctcttgagttttctggagatctggtcagattcaagtgctttctttatggccttctggactcaagagctgctgattttgtgcctgtcaatagttcagtctgcctaaatgtcctggaacttatctgattgcagactcatggaggtgtctctatattggatcagctatagcacaggaattcttgagtccacttaactaaatggcacccctgagtacagcaggctgcctctactgaaatcggaaatcaatactgcagcgtgaaaaagcagtagccagctcaaatagtgttaaatcatgcaggcttctgaattgagagaaaaactacatattctctcaactttaataattctttcttttcattaacattatcatcttatattacaggtgaggaaattaagaacctgtgttttcgcaaattgcttataattacagagcttagtttacacagctttagtttaaacctgggtctctcctgctctataatttctgctcttcagtatttaaaaaacagctaatatttactgagcacttaccaggtaccagacattgtgatgggcactttgattaaattttctcattgaactctgtaattgttctaggttaagcaatgctgcagtaacaaagagcccctgtgtaatagaagttaatttcttgctcacataacaatcaaaggtaaaacttttatatcaatgtttgcctctccttcatgaagtaatccagtaactcaggttgcttctatcttgtggctcatccatatcttagggacttatttttgtttggatccatcaggcaaaaggggaaaaaatatgaagaggcctctctctaaaagttttagctgaaaacaacatctagcattgctgcctatattccaatgggtagaactcagtcacatagccacagtaaatggcaagagaaaccaggaaatgtggcctagtaggatgcctagaaatagaaggaaacagatttttggtgaattggctggctcttccacagggagacactcttattatcctcattttgcaaatgggaaaactgagactaacaaagattaaataactagcctaaattcacagagctagtcagtggcattggaaggatcaagtctttatgactctggaacctaaactccataccagaacctaaagtccaataaaactttccgtgatgatggaaatattctgtatctgtactcttcaaaagagtagccactacccacatgtggccaaagcaattctttcccaacctctcctctctttctcttcaagcctccttcttattttcagtcctcccattctggtatcccatccccttttcttcaaaacacatcatccttcccatccaccaaggagaaaattctgccccttcatgtgtcaagcctatgatgctaatgggacccctcctctgcctagtctttagtgactccaaattggaagaaatgggctgttgtacaaatggggtcaacactaggtgcttcaatgtcaaaataactttttcattagtgaaaattagatctgatttccttactatctaaaaagagagcctaccttgccaaagcaagtgctagtttgcttgtttgtttccaagaaaccatataaactgatcttacattaaaaagaatcttgggagttagtgtttcagtggggaaaacagaaaagttctggacaaagatggtggtaatcgttgaaatacaatatgaatatacttaatgccacagagctgtaaatttaaaaataaatggcaaattttatgttatgtatcttttaccacaacaaaaattaaatttagaaaaagccttcttcctgttaacatgactttgaacctgctccttgtgaaacaactgcctgacattattgtactacagagtatttaatgcctgcctaaagctggcataccttacctataatggctcttgttctctcagcaatctgggatgagggtatggcagctcctaagcgattctttctgactcccaaattcctcccttttggaaacccttgcatgcaaagggtacagtccttccttgcccaaccattatgagggaagaggccaaaagagatggtacaacctggccaaactgttttattgaaaaaattgtccatggtcatgctctgtctttgatttttttaaaaaatgtttttgaaaaagtcatctttggaaaacactttgcaagtctaaaactaaaagtatcagatgaatgctattcagtgccctgatgaggtctctagttgaaagtaaagaggtagccctcttattatctggctggacatttccctactagagagaatgtccatctaaataagttgcaattgctgcaactggaagcagtttcctcacattatttaatccatctgcatccccttctgcactgaaaatggatagctaaccagctactgggaagatacttggggaaaactgggacgtggataaagttgcttaatgatgaagggaaggattattctgagtagaaattctgagaatcccccagtgcaattttgtgtcattattcaaattgacaggactcactactctgtttaaataatgctgtgttctggtaacactggttatgctggttgctcttacttgattgtttatttagtttaaaatatttttaatatgagttactctatagtttattccactactttgttcacacagaaactgaaaaagttgcctcaagatctcaattttcatttttgcacatttggaaatgttgtttttaacctagccttgtcaacaggaaggttttcacaaactggattgacatcccaagatgccttttcattgagtcagtttctgcagggcatccagcttctctcccacattttaaacattaaaccagaatgttgtttgaaaaagatgaaaacatcacaatccgcagccatcctgggctttttttctggaaagcattgtcagtagaatcatcaaataaaacatgaagagacctgtctcttaggaagaagatcagctttcataaagaaagagtccttgaagcaaagggaaatgaccctttcttagatgcttggcagaacaatcccataggccctccttctcaggagctggaggaggtatcagcatctcctcaaagatatggtgcctgtaagaccccacctgtctgcagtgtttatacttcccaaaaagattaaggaaggccaggaggactttgtgtggagcacacaaaacaaatatcaagaaagagcaaattgactgacctgataagaaacgaattattttctctctgagagtgtgtgaattgttctttcttgggaacctgagctcattgaaaatgagcataaatacttttggacaattccagtaaagagaagaaagttagaatgatcatcaatcccacatccacccccatgcaatttagagagaaaccaggtagagatggagagatgcctcctcatgttgcctacagaggccactcgtgctgcatggctccagtcagggtcccccgtctcactgggtctagtcttcagcttctttgctggtacaggaactcagctttgtccaatcactcagacttagtgggacctggaagaactgactcacggcaaaaggcagatgcataagccaggaggccaacatagtaatttacaaaaaacaaaaataaataaaatataaataaataaatttggcaagaactataattatcaagctccatacagggaacctctttcctgatacctgaatacttttgaagcagaattagcaaccaaaatatgttatttggtgagcatagaaaaatcaaggcaagggcacatgaggagtctggagagtgtttactctggtcagcagttgtgactgaaagactcaagagtctggaacatctgattaagttaataaggtgcttgatcttaaaaatatagataattcggccgggcacggtatctcacgcctgtaatcccagcactttggaaggccgaggcgggcagatcacgaggtcaggagattaagacaatcctagccaacatggcgaaaccccgtttctactaaacacacacacacacacacacacacacacacacacacacaaaattagctggacgtggtggcacgtgcctgtaatcccagctcctcgggaggctgaggcaggagaatctcttgaaccagtgagttggaggttgcagtgagtcgagatcacaccactgctctccagcctggcgacagagtgagactccctctcaaaaaaaaaaaaaaaaaaaaatacagataattctaggctttcatgtactcattaaagctgatctctgactcccaattcctgaggtgagccacagtatatcttgtcaatgtataattttcaaaaagttaaaagtatgactctcattgaactatcaaatgaatatgtatcaaaaattttattcaactcattaattgatgaggtaaccaataagaagataaaagttctccaagagcattttggataatttagtttacatagtctttttctttaaaaaggactaaaatttctagatacaaaattaattaatgtctttaggggcaataaaccataaacttcagggtcatctttacaccagaaggaaatcattgcatcatatacaagtttaacatgtataactttacagatcctgagccctcaattattaataataaatagtaaatagcagaaacaaataatggtaaattcttataggaaaatatatcatccttggatgggcctgttaaataatgattaagtatggcattgaaagggcttacggtcacactctcggacttgttttcaggttgtggataatttttcttaacaggctcaagtagctcctgagttcacatttctagaagatcctgatatatgcctgaaattcccacctgtccctctccattgcctccccatctctgaatagctggcatgttcttaacattcaggtgtcaactcaaaactgaagcactcagacttcgttgttcatacatacattcctccagttactcttcatctaatcaccatctccttcatggcacttaccaccatctgtgattacgttgtttatttgtttacatgtttatagtttgagtcctctactgaaatataagtgccaaggtccgtgggaaaggaactggcctatgtaattcacctctatatcctcagcccctaaaacagtgcttggcatatagtagattcttaataaatgtatgcttaaagaatgaatagatggatagatggattgatagatagatggatggatatatacacaagcccatagttacattagctcgataccattgatgacattgtaccagattttttgctatttggtctcaccttttaaagacccctagaaaaatacccctcttatctactcattcttatctccacatatatcgatgctagtgattaggttaattaggttaatgtttccatcacatcagttatgacctgggacacttcctttaatttaagacaagtctacattcatcatggaagctttctttcctcattgtcatgtctcagagaacttcccattgctactcatttgtcaccatattttctcctaacattttttttccttaaatttaaacatatctttccctccaccagccatagggagttagaagaaggaaaggaagggaagggaagagtctggaggataaagcagccaacagagaaaagcactccttcaggaatgaggggctggaatgcaagtcacaaaaaaaaaaaaaaaaaagaaacagtattgtggccacatctggttctcacagcatagcttttggaggggaaagaggcctaaaatcttagaaaaggaaggtaaagaaagtagccttgtggattttctaaatgtcaggtcctttttatttcactggcgtattttatggtttagtactttgcttctttgaacagttcctagaatagcaaggattaagtctagtactaaccatgataaatcctggtttacctttaagcaatgagatttttaatagaataaagtagaagagggatgtggggtgagtgagacaaacaaacaggattcaattaagtcttaaaatgggtgagaaaagaaagagcatcctttggattctgatcctcagaactttttctacaacctacttgtctccacccccctgccccccgacgtcggtttcatttcctgtggcaattaactttacttcaacattatgttgaccacacggcatgctttattgcaccggtatttaaaacctttcatgacagctatcccatgaaagagtaaaatcactaaatggacttgtcaggaagcattacctctagctcatctgccctgcagaccagctggccttcttcataagctctcttaccatgcaatcacccctgctactcccaataatcaaactgactcttgaaggcatatgatgtaacgaaccacaacagaccttaagacaaggtcagcatatgatctagaataatatcatcaaactttagcaacatcagaatctccaggaaggcttgttgaaacatacatcattgggtcctaaccccagagtctctgattcagtaggtctagggtggggcccaagacttgcatttctgacaagttcccagatgatgctgatgctgctggttcagagttcatgcgtaaagcatgattcatatagaagaaatagtcaagagacagtttcaacaatacatttccctcaattcacccatctcaaccttaaaatttctctatatctgcatccactgtttcttttttatgaaaacaagtttatctgcccactgcactccaattcaattactcaaagactctttcccagagtgttttaaggcaagaagaaagctttggagtcatctctcaatagttgcttcttaaattaacactattgacatttggagttggataattctatgcagtgggggactggactgggtattgtagtatggttagtgagcctctatccactagttgcaagtggcactgcccccttcagtggtaataaaaaaatatgtctctagaaactgccaaatcacccttgttgagaaccactactctagtcaattgtatctttactctctccttctttgttgggatttaagggtgaaaattcatcgcatgccttcctgagttggggccagttgagaaacaaaaacagaacttgaaaacatggccatcagaatataatttcactgttgctaaagctggccccagtgcacaagtaggaatgcttctcctgggagatgtttgggttgtgattaacaataggtgaatgaattctggctttaaactaacacagaaacagaaaaccaaatactgcatgttctcacttgtaagtggaagctaaatgatgagaacacgtggacacaaagaggggaacaacagacgctggggcctacctgagggtagagggtacaggagcagaaaaaaattaaaaaaaaatttggtactaggcttagtacctgggtgacaaaacaatctgtacaaaaatccccatgacacaagtttgcctatataacaacacacccatacccctcaacctaaaataaaagattaaaaaaaacaatagatgaggaagcccatagctaatcttaggtagggaaaaaaataaatgtataaataccaggtgggaccacagtggcaaaactaaggcagtggatctcaaccttggattcatattagaatcacctgaggagctttaaaaaccactggtacctagaccccacctcagaccagttaaatagaatttctgagtataaaggccaaaacatcagaaattttaaaaagcagccaaggtgattataatgtgcagtcaaagtaaagaaccaccgcttaacttaatagactgagaacattaaatcccttgttagatttttctttaaggtattaaggagacagcccctagtctgaaacaagatctctcagtgtttcttaagactttttcagtcacaaaattctgctgacgtgtaagttgcataaacataatagaaaggccatgaaatatttacaggcttcagagtaggcttcctacttcaagtgtctaagccaagaacttgaacgcatgtgcaaagacctggaagtttgtgattaataggctgaatgctgcagcattttaacgtgttggggaggagacctagggcaggaaaaaatatgacaaggttagtgaggtaaacagaacatttggatcatgttaaggagtcttaatttctatcctgagagcaatgggaggcactgagggcctctatgcagaggagtgatgtggtcatatttggatttctgggattaggactctgcctattttgtagaatttgaattgcatgagggcaaggctggaggcaggaggtctggttaaaagtcgtatcagtggccaggcgcggtggctcacgcctgtaatcccagcactttgggaggccgaggcgggcagatcacgaggtcagcagatcgagaccatcctggctatcatggtgaaaccccatctgtactaaaaaaaatacaaaaaaattagccaggcgtggtggcaagaacctctagtcccagctactcaggaggctgaggcaggagaacagagtgaaccgggaggcggagcttgcagtgagccgagatcgcaccactgcactccagcctggacagagcgagactccgtctcaaaaaaaaaaaaaaaaaaaaaaagaagtcctatcagtaatccatgtgagttaatttttaaacagggatgaccagaacttggtaccagatcacctttggatataaagagaggaagaggaaagacttaaccctgattcttctattggtcacgtggatgaaaaatggtaccataccttaaaatcagaccactgaaggagcaaaaggtttgggatgagaaagatgaattcagttttgtatttgctgagttgaaggcatctacagactatacagtgggcagttggcccaggattgtatcaaatttagcactggaagtcccacatctcaggaaaccacttagtcctgggtgaaccaggacagttggacaacatggcagttgcctacataagtttgattctcagagaagagaactcagcagggacataaatatgagttgtcagtaaatatatggcaagtgtgcgtgtgtacatgcatgtaagtgctcatgtgtgtgtatgactagaaggaaaaacaccaatctaataacagtatattcttctcagtggttaaatcataaagctatttattttttttaaattggcttttaattttctaacttaataatatatagtttaaaattcacacacacatttttaataagcatgccaatttgttatatttgctgagaactttctagttcctgtttaaaaattcaaaatggaaataattatttttaaaagtcctagagaggtttcccggtatgggcaagtgtattctacttttgtatagtgatattagacaacattaagaaatagactacagatcaatttggttagtacctggtgacaatctcctaaattccagtgtctacttaggcttaaagtaacctggcaataggaaagtcacttggtgatatgaactaaactgatagagaaggctgctgtccttctacgtttttattagctttctaaaatgagtttatcatatactaccttgctctgttgttcattctgcaaagacaacctacactacacagtaatcaagtatgtatttgagacttagcagccgcacctaatttctttggaaagcatatcggcaatgatttcatcagccatttattaaaacaagtaagctaaaaatgataacagcaatcctcaatctgagtaacgaagagagcatgggagaagcctatgtaagttctggatcctgtagaactgggtacaccggtgttgggatttgaagcccaggactccttagaatcatgtgatagagacctcaaggtattccaacaactttatcatcccagtgaaaaaaactgagaaccagagaggaaaaattacttccccgggaccacacagctcattagaagccagactaaaacttggatctggacttacagaagggaaaagagcattaagtcagtattgtgtacctactgtgtgccaggaactgtgccaggtactaccccacattccatcccctctgtccatacaacaaaattgcaaggttaacaaagaaggaaactgaaaatcagagagctgagtaagttcctgaatatttgcagacctcttgagggaagaacctgaagcccaggtctgtttaactctaaagtcctttctcctaagacttcctaaagccttgtgtttcttctgtcaggccacactaacttcctcaaaactaccattctgatatgtaggctaaatgaggaaacaggttcaattgatcttctaaggcaggagaaaaacaaaatagtagatgtgtttatctatcatcttcagtaatgaaaggaaaaaggaagagaagaaataccaacgactttcctgagatttaatatcacccaacacatttcaggtgaagtgcccttaggtgtggacagttgggaaaaagaggtctcgagggtttttctaagcttttaataaaagctcagagagccccatagtgtttaaaatatctcaggaggaccctgcatatatgtgggagaaattatgtatgggaagaaaggggaaggccctttgaaggattctttcttgcttttctgagtctgaagtcagaagtaataaaaactctcttttgcctttctgcctacattttataaactgtatctattttctaatgctttcctcaacattttctcttcagagcctcacctaggaaatagcacaggaattaatattctaattttacagatgaagaaagtgagacatagattaagtaactgacacaggatatcatggataactagcaaaggtgggaagagaaagtgggaaaaagagatgtggtttgaaatggtttaccattttttactatgcatttctatcaataaaagcacccttcaatgtaggcacattttactaattgcaagcatttactattatactaatatagtatgtatgttttaaattttatgcaataatagaatttttttttttttttttttttttttttgagacggagtcttgctctgtcccccaggctggagtgcagtggcgcgatctcggctcactgcaagctccgcctcccgggttcacgccattctcctgcctcagcctcccgagtagccgggactacaggcgcccaccaccacgcccggctaattttttgtatttttagtagagacggggtttcaccgtggtctcgatctcccgaccttgtgatccacccgcctcggcctcccagagtgctgggattacaagcgtgagccaccgcgcccggccgcaataatagaatttttaaaggctatggttaaaaaataatacagatgaaagtgcttatagtttcttccttcacctaaattatgatggtcacaccctagggtggcccctataactctcaccctctagtagtcatgtttttgtgtaattccctctccttgagcgtgggcaggatctgtaactctctaagcaatagatatggcaaaggtgatgggatatctttcttgtgattattttttatgtcatatatggttgtatggaagaggtgaagatgtaattaatatccctaatcacttgaattatatctaattaaagggcagttatactagtgggccttacctaatcagatatgccctttaaaagatggcctaggctttccctgaagtcagaaactccaagcaacagagactctgtctctcagcgtctgtcttctaagaaacaagccaccgtgaatagtacagccacaaattctgccaataacctgagggagcttgaaatcagatccttccctagtcaagcattcagatgaaaatgcagcctacctgacacctagatttcagccttgtgagatactaagcacacaacgcagccacggtgtaattgaactcctgacacacagaaagtgtgagataacaaatgggccttcttttaggccattattgtgtggtaaattattacacagcaatataaaactaatagaccaatagagggtcttttgtaccccttaggttttgcataccttatgcactcttttagccctttgcccacaagatctcgtttcatcttcctccaaaccctataagaattgatatttctgtaaccactttgggagtgaagtgacagactcagcaggcttaagtgacttgccccagctctcacagttagaagtgaaaggcaagagacttgaacgtcagcctggagattagaaagaataaagccagttcttctagcttccttttgttgttattgttgtgattgttgcatccaactggccctatagtgtgccacaacataaaactatttccacatggccgccctcccctgctggtgcctctcgtaataggaactagctttttctcctgggtttctgctaatttactgtcctgaattcttctacttcagcactgatgcattgtaggacctgtagctcttcagtgacaacagtgggttctgtgttccattgttacttacacacgagaagaatctgtgtgagaaccatctatcaggactgtaaagttacctgactataaagttctaacagttgactgcttcaatattaatggagcttgtcattctgagaagcaatttgatatgactttcctttcattctactgtggaacaaagtaccaaaagctgctgcttttcacaaataaatttttcacctgggcacagctatttgagtacctgttgttcatgtgtttccaggtctcaggtcttgcaaactcattactaaccaaacccagggacatagagttaaggaggaaaatgcttggtttccatgcttgccttgctggaggccattttcctctaataagaaagacttttgctgaactggaatgacaggaagacaggcaggacttttcttccacctacttacaggaattgggcttctgtgggcatggtccagagcttagtagcaccctccctgggcctcattttctttagtaatcaaatggagataatagtacctgcccttatttcatagcgttggttcattcacttattcactcattcattctacaaatcttagattgtctactgtattccaagatagccacatgaaaaaatttataatcaagaagcagagctggaattttcagaaccatgtcaatttcaaatatttaaactatttattctttaacaattataagtaattgctgaatatcttttaagtaccatctgtcttaattacattaaatatgtagtcattctttcagtcatatataaatcttctttcaagacctactgtctatgaagcaccatgctaggttcttaggatatggagatgaatatctctatcatcaggacattcaaagtgtaatggggaaggctgatgtccatgaataagcagataggtttttattatttatttatgtatttaattttgagacagggtcttgctctgttgcccaggctgaagtgctgtggcacaaccacagctcactgcagccttggcttcctgggctcaagcagtcctcccaccttcagcctcccaagtagctgggactacagatgcatgccatcacacctggctaatttttgtgttttttgtagagttaggatttcactatgtttctcaggctggccttgaactctgtgctcaagcagtttttcctcctctgcctctgaaaatgctgtgattccaggcataaaccactatgcccagccacacagacttattttaaattttaagtgaagaaatgatagggaatgaaaaatccttagagcacctatcctgggatgggggagaaaaatgatattgtcagagctgcatttctgatagttaatctggttctatggacttgaagaagagaagaaaaacagagtgctactgtggttcagacaagagatgaagaggcctgaaatgcagtcacattgaggataaaagagcaaaggagtcatttggagacttatttaagcaataaatttggtaggaaatgttattgcccagagaccaggtgggaaagggtaaaagggaaagtagagaatcaaaattcctctccagtttctattttgagtaattttttcccatcagccatgcagggtaggtttgttatcaccattttactcagagagcctcaagatcaagtaactagaaagatcaggaccaagattcaaacctaggccaactaactccaaagtccatgctttttgctaaaaatcaaacctcctctaggatcttcatatgaatctgacaatgtgcccctattcttagatccaaaaatctgttccctggacaattagatggggcaaaggtaaagaaaggacatggcaagattagagacggtggagggcaggcaaaaggtggaatctgataaccaggcttctcttccttccacgtcctacattcctttgccaatgctcttctccactagctggtacacagttcttggggttctcctggtaacttggtcctgtctgtagaaatcaacaaaggcagtttctacagtaacccttggcagtaagatttactgggatggctcacagcgtctccaggtattgagatatatcttatgtattctaaaaggaaaggcttaaaagatgacaatcaggaagcttcagttggctgcttgcttactagcatttctcaggctccgtctttcacttcagctctgatttgcaatatagaaccttctgcctggccaaagcagtatcttgacagtggataggagctattttacccctcagagttacctctgaatctgcacagtaactataagacagctgcaggcacagtagaatgcccctcttcccctatctctgctctgctccccaagactagaggctggtgattcagatggcagaatggtaccatctgtgagtaaatgctctgcatgatccacagtgatttccaaggtaacaaagatattccctagcagcaacagagcccagagatggtacctaactgtactcactggatgcctagaacttttcagagcttgtcctcatcctgacatgcttatgtatctctttttcttcaaccagctcatttgattcctagcattgttttttatttttaattttttgtggctatatagtaggtgtaaatatttatggggttcatgagatattttgttgcaggcatgcaatgtaatataagcacatcttgaagaatggggtatccatcccctcaaacatttaccctttgagttacaaacaatccaattacactctttattttagaatgtctgctgtgactgtcctcagcaggactctctctttctgaatttagccctgcaacatgtgttggaccttagaaacatgggggaggttttttgaggaggtttccagaggacagaattcaaccttgtgtttttctgctatatatagtgagcttttcctcactgtggtgagaaaactatatagttttctgctatatgtatgtgagtattttccctatatgtaggggaaaggatttcctttgtttcacagagtaggtcatttcaatgaaagttatgaaaacaggaaattatatttgtatattgattcattttacagaagaggaagaaaaaaatatgttgctctggaaggggaaaagaatcctttggcctaactcataattcttggtacattgtatgttttaaaagaaatgtaactagaactcttcagtatcctagaccagtatgaaatgacagattttctattattttccttctgtttgtgtatagtttgtcactttttttcagcagtttgtgtccttagtgaatcacagagtaagattctaagcactttctgaacaaagtaacccctgcattagaaattggatactatgcaacagttgaaaagcaaggcctttcatgcatagtttcttgagcctcctgagcctttctccaaggtcaaggtgagggctccactcacaattctgaaactcctctttgtgactttagacaaataaccttcctgtgcttaaactacattacctacaaagatggtaatgcctgcccctagccacttctcagttaccttttttcaggaagtgagaaagtctaaaaaggactttggatccctttaagggacctgttattttagaaatgcattattgggagtcagggccacataatcagggcagtcagatatttgccacaaaggctcttgagacttcaaagaataaaaaaatcaatgaattgcttactttatcaaaactctgtatttgaaactttggatcttttaaaatttatatggttatagttaaaatactttacttctctggacctccatcattaataaaatgggcataaaatagtacctgtcccatagagttgtaagaattaaaggaggaaatgaaaacaacacacttagcatataataaatagtcaaaatgcatggccaaagtgacctgtattagatgttatgatagataattaagatgttttgttggtgagacatcagatgaaatgaaacatacttgtgttctctgaggcaccagcccctcctgcagagagtcagtgtttccaagaaaaaaaaatggccaaacataaaagatgcagagatattatctgtaactagttataatgaggtcttcaaaaatatataactaactccagctctttgttctaaaggatgagtcccatttcaaggtaggtacgatgttagtctggacatcacagatggatagtggcaataacagcaatgtaattcaagacatcttgtatcctttcagtttgcagaaccatttcagtcttccaagtttttccggtttttcacttctaggcaacaatggtttggaacctccagcatctctgttggcagtaaattcctagttccagttcatcagaagctttttgcttgtgtgacattactcttggtctcctcttccttatctgaaaattttattgacctgcaattaaattatctacagttggaataattgcttgctgtttctctgcttctgaccactactggaaagccatttggactttagattgtgcccagctttccttcaccttccttgattatgctcctcttatgtacctgctaattttatctagagtccagagcattcttagaccttttccattcctgtaagtcccagaggatgacactgacttgcttgaggtcacagaatcaatcagttgcttagggtaagaggcaagatcttctcattcctaattctgtgatcttttcacttcttgtatgtatggccccttcttgtataagaataaatgtgattcatatctaaaatctggacatggaaaatggactaagctgaaaataactgttggcaaaaacataaagtagtatttttcaaaaggtaatccccctaaccagcagtgtcagcatcacatgggaacttgttagaaatgtaaattctcagccatgcctggtggctcacacctataatcccagcactttgggaggacaaggcaggcagatcatgaggtcaggtgatcaagaccatcctggttaacatggtgaaaccctgtctccaataaaaatacaaaaaactagtcaggcatggtggcgggcacctgtagtcccagctactcgggaggttgaggcaggagaatggcttgaacccgggagacagatcttgcagtgagccgagatcatgccactgcactccagcctgggtgacagagcgagactccatctcaaaaaaaaaaagaaatgtaaattctcagtcaagctccacctaagacctactaaagcagaaattcaagccctctgggtgatgcatgctaaagcttgagaaccaatggtacagactatgccaaaagtgtgtaccttaattacaaaaggctattaaatgggcactgtattagtccactctcgcgctgctatgaagaaataccaagactgggtgatttatatggaaagaggtttaattgagtcactgttctgcagggctggggaggcctcagaaaacttacaattgtggcggaaggagaggcaaataagtccttcttcacatggcggcagcaaggagaagtgccaagcaaagggagaaaagccccttataaaaccatcagatctcatgagaactcactcattatcatgagaacagcagcatggaggtaacagtccccatgattcaattatctcccaccaggtccctcccatgacacatggggattatggaaactacaattcaaaatgagatttgagtggcaacacagccaaactatatcattccaccactggccccttccaaatctcatgtcctcacatttcaaaacacaattatgcctttccaccagtcccccaacatcttagctcattgcagcatcaacccaaaaatccaagtccaaagtctcatctgatcccttttgcctatgagcctatgaaatcaaaagcaagttagttacttcctagatgcaatgagggtacaggcattgggtaaatacacccaatccaaatgggataaattggctaaaacaaaggggctaccagccccatgcaagtccaaaatccaaaagggcagtcattaaaccttaaagttccaaaatgatcccctttgactccatgactcacatccagataccttccaccagataccctaaattatctctctcaagtttgaagttccacagatctctatggcaagggcaaaatgccaccaaactcttcgctaaagcatagcagaaatcacctttattccagttcccaacaagttcctcatctccgtcagagaccacctcagcctggaattaattgtccatatccctatcaccattttggtcaaagccattcaacaagtctctaggaagtttcaaactttctcacatcttcctgtcttcttctgagccctccaaactgttccaatctctgcccgttttacccagttccaaagctgcttccacattttggggtatctttatagcagaaccccactctctgtagtaccaatttactatattagtccattctatgatgctatgaagaaataacctagacagggttatttataaaggaaagatgtttaattgactcacagttctgcagggctggggaggcctcaggaaacttacaattatgacagaaagggaagcaagcatgtccttcctcacatggcggcaaagggaagtgccaagcaaagggggaaaagccccttataaaaccatcggatatcataagaattttctcactattatgagaacagcagcatgggggtaactgcccccacgattcaattacctcccactgggtccttcccatgacatgtggggattatgggaactacaattcaagataacatttgagtggggaaactgccaaaccatatcagccattaatgcataaaattgtgttaggatttcacaagtagactttaattttaagtctattattttacctggaagacaaggtaagataataacttttcaaggtccaaggttttacttaaattagcagaagtgttcttagggctctgcagggcctggctgaaaaaaagagcacaaagtttaggggagatgctgccagaggcaggcaggtattcctcttgatggaacatttactctttactgtccaattcagctgacatcaaatttctctatagtcttacaccatgctgttttgcacatgtatattaccttcctggtctctggagatatttgaatattctgaacactatttagtctttttaaatttttttattttttatttcaataaattttgggggaacagctggcatttggttacatgaataaattctttagtggtgatttctgagattttggtgcatcaaccatcactcgagcagcatacactgtatccaatgtgtagtcttttattcctcgccacccctcaccctttcccccaagtccccaaagtccaatgtattattcttatgccttagcgccctcatagtttagctcccacatatgaatgagaacataggatgtttggttttccattcctgaattacttcacttcgaatgatagcctccaattccatccaggttgctgcgaatgccaatgttttgttccttgttatggctaagtagtattccatggtatatataaataccacaatttatccactggttgattgatgggtattggggctggttccatatttttgcaattgcgaattgtgctgctacaaacatgcatgtacaggtatcttttttgtataatgacttcttttcctctaggtaaatacctagtagtagaattgctagatcaaaaggatacttttagttctttaaggaatctccacaccgttttccagagtgattgtactagtttacattcccactatcagtgtaaaagtgttcccttttcattgcatccacaccaaaatcaatcaatttttatttttttatcatggccatttttgcagatgtgaggcggtattgcattgcattgttttgatttgcatttccctgatacttagtgatgttgagcatttttccatatgcttgggacccatttgtatatcttcttttgagaattgtctattcctgtccttagcctactttttgatgggattttttttttcttgctgatttgtttgagtactttgtagattttggatattagtcctttgtcagatgtatagattgtgaagatttttctcccactgtgggttgcttgtaactctgctggttatttcttttactgtgcagaagctttttggtttaattaagtcccatccatttatctttatttttgctgcatttgctcttgggttcttggtcatgaagtctttgcataagccaatgtctagaagggttttcccaatgttatcttctacagtcctcatggattcaggtcttagttttaagtctctgatccatcttgagttgatttttgtataaggtgagagacgaggatccaatttcattcttctgcatgtggcttgccaattatcccagcaccatttgttgaataaagtgtcctttccctgctttatgtttttgtttgctttgtcaaaggtcagttggctgtaaatatttggctttatttctgggttctctattctattccatgtgtctatgtgcctatttttatactagtaccatgcttttttggtgactatggccttatagtatactttgaacttgggtaatatgatgcctccagatttgttctttttgcttagccttgttttggctatgcaggctcctttttggttctatatgaattttaggattgttttttctagttctatgaagaatggtggttgtattttgatgggaattgcattgaatttgtggatcgcttttggcagtatggtcattttcacaatattgattctacccttccatgagcattggatgtgtttccatttgtttgtgtcatctatggtttatttcagcagtgttttgtagtttcccttgcagaagtctttcacatccttggttaggtatattcctaagtaatttattttattttattttttcagttattgtgaaaggggttgagttctttatttgattctcagcttggtcactgctggtgtatagcagagctactgatttgtatccattaattttgtgtcctgaaactttgccaaattcatttaccagttctgggagctttttggatgcatctatagggtttcctaggtatacaatcatatcatctgcaaacagtgacagtttgacttcctctttactgatttggatgccctttatttctttctcttgtctggttgctctggctaagacttccagtactttgttgaataaaagtggtgaaagtggacatccttgtcttgttccagttcccagggggaatgctttcaacttttccccattcagtataatgttggctgtggatttgtcatagatggcttttattaccttaagatgtgtcccttctatgctgcttttgccaagggttttaatcataaagggatactggattttgtcaaatgctttttatgcatctattgagataatcatgtaatttttgtttttaattctattcatgtggtgtatcacatttattgacttatgtatgttaaaccatctcatatccctggtatgaaacccacttgataatggtgaattatctttttttgatatgctattggatttggttcactagtattttgttgaagatttttgcatctatgttcatcagggatattggtctgtagtttcccttttttgttgtatccctccctggttttggtattagggcgatgctggcgtcatagaatgatttaggaaggattccttctttctctgtcttttgtaataacgtcaatagaattggtaccagttcttctttggatgtctgatagaattcaggtccaaatccatctggtcctggacttctttgttgacaattttttattaccatttcaatctcactgcttgctatggatctgttcagagattctatgtcatccgggtttaatctaggagggttgtatatttccaggaatttatccatctcctctagttttactaatttatgcatgtaaagatgttcatagtagccttgaatagttttgtatttctgtggtatcagttgtaacatctaccaatttttttctaattgagcttatttggatcttttttcttcttttcttggttaatctcgctaatggtccatcagttttatttatcttttcaaagaaccaactttttgtttcatttatcttttgtattttttgtttgttttagttttatttagttgtgctctgatcttccttatttattatcttctgctgggtttggatttcgattgttcttgtttctccagttccatgtgatgtgaccttagcttgtctatttgtgctctttcagactttttgatgtggcatttaatgctatgaactttcctcttagcactgcttttgctctatcccagaggttttgataggttgtgtcactattattgttcagttcaaggaattttttaatttccatattgatttcattgttgatcatttggaaacaggctatttaatttccacatatttgcatcgttttgagggttccttttggagttgagttccaattttattccattgtggtctgagagagtacttgatataattttgattttcttaaatttactgagacttgttttggggcctatcatatggtctatcttggagaatgttccatgtgctgataaatagaatgtatattctgcagttgttgggtagagtgttctgtaaatatctgttaagtacacttgttttagggtatagttaagtccattgtttctttgttgactttctgtcttgatgacctatctagcactgtcagtgcagtattaaagtcccccactatatgttgccatctgtctcatttcttaggtctagtatgagtaattgttttgtaactttgggagctccagtgttaggtgcatatatatttgggattgtgatatttgcctgttggactagtccttttatcattatactatcacctctttgtcttttttaactgctgctgctttcaagtttagctattcctgctcacttttggtgtccatttgcaaggaatatctttttccacccctttaccttaagtttatgtgagtccttctgtgttaggtgagtctcctgaagacagcagaaacttggttggtgaattcttatccattccggcattctgtatcttttaagtggaacatttaggccatttatattcaatattagtattgagatgtgaggtactattctattcatcatgctatttgtggcctgaataccttgtggtttttttttcattgtgttattgctatataggtcctgtgagaaatatgctttaaggagcttctattttggtgtatttcaaagatttgtttcaagatttagaactccctttgtagtttttgtagtgctgacttggtagtggcaaattagctcagcatttgtttgtctggaaaaggctgtatctttccttcatttattaagcttaatttcattggatacaaaattttggctgataatttttttctttaaggaggctaagaataggaccccaatcccttctagcttgtagggcttctgctgggaaatctgctcttaatctgataggctttcctttataggttacctgatgcttttgcctcacagttcttaatattctttccttcatcttgactttagataactggatgactgtgcctaggtgatgatctttttgtgatgaatttcccaggtgttgagtttcttgtatttggatgtatagatctctagcaaagctgggaaaatttttctcaattattccctcagatatgttttccaaacttttagatttctcttcttccttgggaacaccaattattcttaggtttggacatttaacatagtcccaaacttattggaggctttgttcattaacaaaattttttttctttgtctttgttggattgggttaatttgaaagtcttgtgtttgagctctgaaattcttccttctgctcatttgattctattgctgagacttaccagtgcattttgcattactctaagtatttcattgatttccagaagttgtggttgttttctatttatgctatctatttcactgaagaattttcctttcatatcctgtatcatgttttttatttctttaagttcgactttacctttctctggtgcctccttgattagcttgataatcaaccttctgaattctttatctggcaattcagagattttgccttggtttggatctgttgctgctaaactagtatgatcttttgggggtgttaaataaccttgttttgtcatattaccagaattgtttttctggttccttctcatttgggtagactatgtcagaggaaagatctgggattcaagggctgctgttcagattcttttgtcccactgggtgctcccttgatgtgctgttctcccttttcccctaggaatggagcttcctgagagctgaactgtagtgattgtttatgcttttctgggtctagccacccagcagagctactgggctctttactggtactgggaactgtctgcaaagagccctgtgatgtgattcatcttcaggtcttgcagccatggatactagcacctgctctggtggaggtagcaggggagagaagtggactctatcagggtccttagttgtgtttttgtttagtgcactggttttgtgttgattggcctccagccaggaggttgcgctttcaagagtgcatcagctgcggtcctatagggaggatgcaaacttgccctagggacacctggtcaagtattaaagtttctcaggtggtgtgcagggccacagagcttccaagagactatgacctttgtcttcagctaccacagaaggtagagaaagaccactaggtgggggcagggatagtagtgtctgagctcagcctctctttgggcagggcttgctgcagctgctgtgggtgatgggggtgtggttcccagtccattggagttatattcctagggggattatggctgcctctgctgagtcaaacaggtcaccagagaaatagaggaaagacagcagtcacaggcttcaccctgcttccatggagcctgcaatcctaaaggccggtctcacacttaccaagcaaccccgctcaacagcaccaagtctattttcaggcagtcagtgaccagggctaagaacttgccccagaccacaagcctccctgccaataagcaagcagagtcacagttttttggcatctcagggagcctgcagcagtgatccagttccttcaaagggtctgtggattctcttggctttactggtatgttcctgcagtagttctttttttttttttttgagacggagtctcgctctgtcgcccaggctggagtgcagtggcgggatctcggctcactgcaagctccgcctcccgggttcacgccattctcctgcctcagcctcccaagtagctgggactacaggcgcccgccactacgcccggctaattttttgtatttttagtagagacggggtttcaccgttttagccgggatggtctcgatctcctgacctcgtgatccgcccgcctcggcctcccaaagtgcctgcagtagttcttggagcaaaagttcacggtataagtctccatacactgcactgtctatgcaagcaggagctgcaagctagtcttgcctcctgtctgccatcttcatccctctcccctgtttggtctgtatgcaggatattagattgatgtgtctcagataatactgtgtagcagaattttcgtgatgtcctattctgcattcaacagaatgtttaatattggcacagtccaatagggctatcacaagacatgtgttgctattgagtacttgaaatatggctagtggaagcagaggaattgagtttttaattttatttaattttaatgaatttacatttaaagagctgcatgtggctagtggctaccctattagacagcataggaatagatatattgatctaatatcttacacaatgttgattaagtagaaaggtaattgtatacttttgaatagtatttagaaaacttagaaattgataaacctagaatagtctttttaaacattagtagggcacttttaggaccactccaaaagtgattatgtctaaatcatttattagaatagtgtgacaaagttaggagccttctgtttatgatgggtgttaagtcattctatgacccgcaggttttccgagactttttacaactgcagctcttagaaatctattttaagtgggaagaggttactgaacccaaatttgagaaaaatcgtggaaaatacaaatgctcttctacagaaatcatggaaaagcattccaaaaatcaaaatttatttttcatccttatgattgagccataagtcaccgatcaaagacctgtcataatcaagtttttcaaagggataagctataaatgaaataatttgaactttaaaagatcatatgtgactgcatctgagtaccatttgatgtgttattaatttattttttcagatgtttttaagtgtttggtaatttcctcgaccaaaaggaaagacactgaatccccccattttccacttaggatgatttcagcttatgaagtagtgacataagacctaggatagtctcttttaaaacataactaaaaattttttaagctttacagtttctcacatgaattctgaaagaacattgcttcaatttttaccttcttatcctctcatctcctttccagttatgagatattgtcagactcaagaatgagaatattgaaggtctggttaggttcaaggtggaagtaattatatttacccaatctaaagtattcatttcaagaatggaggtaagcaaataagaacagactatgaagttactggatattactggcctctaaactggagacctaggtttaattgtctctagaattattttgctggctgatgttctgcagaattggattgtgttgataaatgagtttgattacttactttcttcattgattctgacagctacacctgaagaaattattcaaagtgaagtattatttctaatctagatttcctatggataaagctttggcaaaatatttgccaatcttggcatttatgtattataaacttattaagtcagtgaatggatgctcagcatatgcagtttatatgactattaaatgtgtttccaatacctgaaggataagtatgcatgttgggagtgaagatacatttttatatcacacaaacagtaagataaagaataagagtatatttttattaaatgtaccaagggttgcagtataatctccaaaattaattgagatcaatatggctaaccatcccaatccccaaatatatcaaatgccttaagcatgtgcatttttttagctccacaattctattcttaaaaatttgttctatggaaataattatatatgttcatatttataaatgaaatggccaacataggtgagtagtaacaacaatagtagaacaatttaaataatgtaatcctcttcagcctttacaaataatattataaaacaatgattctaaataaagaagggaaaggggagtgaaccaaaatcatctgccaatttttttctttctttctcctttctttgggtttattctgttcttttttttaaaaataaaaaagttacattgaacatttggcttatcaatttttagcctttcttcataacgagtacaaatgtttcaggctttaaattttcattgatggctcacttttagccatatcacacaaattctaatacttatctttattgtcacttagttccaagtaatttttgtttccattattattaattatgtcttcacttatgagttacttagacagcagactttcaaaaaatttttagttagagattcagttgtttttaaaaaatcaatgtttttatttagtagtaatagtcacagaacatggtctgcctcatatgcttctttgacttttgagaccggctctttagtctagtcctaaccagaggtcaacttttataaagatttctgtgtgtttgagaagaataggtacttctaccttacaatgggtacctataatgtggtagggatgggggtggggtaaggaggtgaatgaaattttagagaggtaatgatggaagcaaagagaccagatagaaagctaattgcaataattcaggcaagaaatgatggtagaatggactagggaggtagtggtgaaaatgttgagatggaattagattctggatatattttgaaagtaaaaccaacaagatttcctgaaagatttgatgtggagtgcaggagagagaaatcttagcctgagcaactggaaggtagagatactattagctgagatggggaggactgcaggtggatcaagtttggggtagaagacccaaatgttaggcaccagaaatggagagttagagtagacagcagttcaggggaaaggtctggactggagagatacgggatcatctaggtcagtggttctccactggggtgcttggggcaagtgctatgggcatctagtgggtagacatcagtgatgcttctaaacaccttgtaatgttcaggatagtcccttaccacaaagaattataggaccgaaatgttaacagtaccaagactgagaaaacctgacctaaggcctgagcataagagaagaaaaggtgctcaaggactcagctttggggcatggcttagtaggagttcaaagagatgagaagtatctatcagataattctaaggtgtgtgtctagtaatactgggggaaaaaacaggatagtcttatgtcctgaaaggcaagtatttatagtatattaaggaggaggaattcatcagccttgtcaatgctgttgatagatcaacaaagatgaggactgaaaattgctctttgaatttaccattgtggggtaattgaaaagaccccatattaacaagagtaatttcaacagagtggtgttggcaaaagtctgacgctgttacttactgactgagtgacttagggcaaggtacttagcctctctgagttttagtttcctccctcataagctgaaggtaataatctacttcatagggttgcatgagataatgggaataatgaggcggagcacagtggctcatgcctgtaatcccagcactttaggaggccaaggtgggtgaatcacctgaggtcacgagttcgagaccagcctggccaacatggtgaaaccccgactctactgaaaatacaaaaattagccaggcatggtggtgcacgcctgtaatcccagctactcgggaggctgaggcaggagaatcacttgcgcccaggaggcggaggctgcagtgagccaagatcgtgcgcagtggtnnnnnnnnnnnnnnnnnnnntgcctcttgggctcaagcgattctcgtgcctcagcctccctccttgtgcctcagcctcccgagaagctgggactacagggtgccatggcactccacgcctgggcgacagacgtgagactctgtctcaaaaaaaaagaaaaaagaaaaaagtgttggggaggggggataattacgtgtaaagcacctatcacagaactggcacatagtaggccctcaaaaaatctaaaatctccttccacaactctcccattcatctccagtttctctcctcctgcaacccctcctacatttcccccacacaaaaactactacttcaatgttttatcaatactaaatactatttagtattataagaggcaattctctcattaaaatacactttgtgatggggaccatatttcaatgatcccttattattaactgaagaaaaagaaaaatgttaataatttccggttttccgtataaggtaatacattgaactgggagaaaaacaggtagcaatttaaaaatacagagtcacaaagtaatttctcattaaattaaatatttcattgttgaattgaattgtttattaagtcttttttcggtttgaaactgtgcaaacccaaaccagtagctccattttctaggcctactgaagttccctgtacctttcccacataaaactactatatacaaaactttcaatcaaaaccaaaaatccccggagagacatgtcaaaggatggggattggattggggaaagctaaagacatagaaaatttctctttaaaatgttttactctggaatttcaactggttttgtcttctcttgggattcagaaaatgattatattaactctaatgattttatggtgactttataaaaaatggatttaattttaaaaggtcaagggtagccatattctgagaaaaaagatatctgaaaatatgtcattctgcatgcaattgtaatttccacagaagtaaaggcctgggaggtcatccaagtaatgagatttcatgctaattccccagttagtcacacacagtgagctcacagtccaagtggcttcagacttctctcgaagctgaggtggctggagaggaattctccatgatttagaacttcagggtaccctgatgttgtcctaatcagcagcctgattctcctatctgctgagcccccaaagagaggtttttatctccctatctctacatctactatatttcattgagtctaagacacacattttattcatattcttcttatgtcttggaaatcaggtttcatcttataatctattgctattggtcagtctgtccagaagaacactttgtgtgatggaaatattctatatctgttccattcaatatggtcacccctagccacatatgtctcctgaggacttgaaatatggctggtgcaactaaagaggtcaatttttaattttattttattttcattgtttaaaatttaaatagccacatatgtctagtggtgggcctaatggacatcataggtgcaagtcaaattcttaaaggaaggatttaactttgtttcttccactcacttgagaaatgactaacttgagactcctttaaattaaattttctgtttgaggttttttcactgcaccagtagtgagttcagactgaggccctgagtacagtagttcccctttatctgtggtttctctttccagagtaccagttgccattggtcagccacagtctgaaaatgttacattactactcatgccctttggggctatgattaagtaaaataagttacttgtacaaaaacagtgtgatactgtgacagtagatctgatcatcaagatggccactaagggactagccggcaggtagaatagatggacaaagggaatgattcgtatcctgtgttgcaggacagcgtgagatttcatcatgctactcagaacacatgcaatttaaaacttacaaactgcttttttctggcatttttcattaaatcacaatgcctacatcattcacctcacttcttctcatcatatagcaattttatcatctcatatcatcacaagaagaaggatgagtacagtacaataagatattttgagagtaagggagagggagaaagagaaggaaagagggggagagagagagagagaacgagagagagaccacattcacaaatgcctattacaggcatacttcagagatgttgtgggtttggttccaaactactgcaataaagtgaatatcacaataaggagagtcacacagatttggggattttccagtgcaaataaaagttatatttacactattgaccaggcacagtggctcccacctgtaatcctagcactttgagatgccaaagcagtcagatgacttgaggccaggagttcgagaccagcctggccaacatggtaaaaccccatctctactaaaaatacaaaaattagccaagcgtggtggtgcatgcctgtaatcccagctacttgagagactgaagtatgagaattgcttgaacctgggaagcggagggtgcagtgagccaagatcacacccaccgcactccaacctaggcaacagagtgagactctgtgtcaaaaaaaagttatgtttacagtatcctgttctttattaagtgtgcaatagcattatgtctgaaaaaaaaagatgaacataccttaatttaaaaatattcttgctaaaaaatgccaataatcatctgagccttcagtgagtcataatctttttgctggtggagggtgatatggtttggctgcgtcccctcccaaatctaaacttgaattgtatctcccagaattcctacgtgttgtgggagggacccaaggggaaatgattgaatcatgggggccagtctttcccgtgctattctcgtgatagtgaataagtctcaatgaaggcagaaataaagatgttctttgaaaccaatgagagcaaagacacaacataccagaatctctgggacacatttaaagcagtgtgtagagggaaatttatagcactacatgcccacaagagaaagcaggaaagatctaaaattgacaccctaacatcgcaattaaaagaactagagaagcaagagcaaacacatccaaaagctagcagaaggcaagaaataactaagatcagagcagaactgaaggagatagagacacaaaaaacccttcaaaaaatcaatgaatccaggagctggttttttttgaaaagatcaacaaaattgatagaccactagcaagactaataaagaagaaaagagagaagaatcaaatagatgcaataaaaaatgataaaggggatatcaccactgatcccacagaaatacaaactaccatcagagaatactataaacacctctatgcaaataaactagaaaatctagaagaaatggataaattcctggacacatacaccctcccaagactaaaccaggaagaagttgaatccctgaatagaccaataacaggctctgaaattgaggcaataattaatagcctaccaaccaaaaaaagtccaggaccagacagattcagagccaaattctaccagaggtacaaggaggagctggtaccattccttctgaaactattccaatcaatagaaaaaaagtgaataagtctcatgaggtctgatgggcttatcagcggtttctgcttttgcttccctctcattttcttctgttgccaccatgtaagaagtgcctttcacctcccaccatgattctgaggcctccccagccatgtggaactgtaagtccaactgaacctctttttcttcccagtcttgggtatgccttcatcagcagtgtgaatatggactaatacagagggtgttgggatgttgcctcaatgttgatggctgctgactgatcagggtggtgatcacttaagattggggtggctgtggcaatttcttaaaataagataacgattacgtttgccccgttgactctttatttcatgaaagattcatttgtaccatgtgatgctgtttgacagcattttacccatggttgaatttctttcaaaattggagttaatcctctcaaaccctgtcactgctttatcaactaattttatataataatctaaattccttgttgtcatttcaacaatgtttatggaatcttcactaggagtagatttcatctcaagaaactattttctttgatattcataagaaacaactcctcatccattagttttattatgaaattgcagcaattcaatcacatcttcaggttctacttctaattctagttctcttgctatttctaccacatctgcagcttcttcctccactgaagtcttgaattcctcaaagtcatccctgagcattaaaatcaacttccaaactcctattcatgcttgtagtttgacctcctcccatgaatcatgaatgttcttaaggcatctagagtcatgaatcctttccaaactattttcaatttactttgcccagatccatcagagcactatctatagcaggtatgccttacaaaatgtattccttaaataagaagactggaaagtcaaaattacaccttgatccatgggctgcagaatggatgttgtgttagcagacacaaaaacaacaatgaatctccttgtacatcttcatcagagcttttgggtgactaggtgtgttttcaatgagcagtaatattatgaaaggactctacttctgagcaatgggtctcacagtggactctaaactttcagaaagccacgctataaacagatatgattgtgatgccattcaggctttattcttccatttatagcacacaggtagagtagatttagcataattctttttcttttctttttttctttttttttttttttttgagatggagtctcactctgtctacccaggctggagtgcagtggcacaatctcagctcactgcaacctctgcctcccgggttcaagcagttctcctgcctcagtctcctgagtagctgggattacaggcgcccaccaccgcacctggctaatttttgtgtttttagtagagacagggtttcaccatgttggtcaggctggtctcgaactcctgacctcgtgatccacccacctcagtctcccaaagtgctggcattacaggcgtgagccaccgtgcccagcaatttagcataatttttaaggaacctaagattttcagcgtggccagtgagcatggacttcaacttagagtcaccaggtgagtcagcctgtctttcaaagatctgaagccgggcattgacttctcctctctagctaagaaagtcctagatggcatttacttttaatataagactgttttgtctatattgaaaatttgttgtttagcctagccatcttcatcaatgatcatagctggatcttctgggttacatgctttagcttctccatcagcacttgctgcttcactttatacttttctggtatggagacagcttctttccttaaacctcatgaaccaaattctgctagcttcaaacttttcttatgcagcttcctcacctctctcagccttcagagaaatgaagagaattaaggacttactctggattgggctttagcttaatggaatgttgtgactggtttgattttttatccgaaccactaaaactttctccctatcagcaaaaagtctcatttgctttcttaccattgatatgttcactagagtagtacttttaattttcttcaagaatttgtttattgtattaacaacttgactaagcgtttgttgcaataggcctagctattggcctctttaggcttttgacttgccttccccaccaagcttaatagcttttgatttaaagtgagagacatgtgactcttcctttcttgaacatttagaggccactttagggttattaacaatattggcctaatttcaatattgttgtatctaaggaaacaggaaggcccaaggagagggagagagatgggagaatagccagttggtggagaagtcagaacccacacattaattgtttaagttcactgtcttatagggacacagtttgtggcacctcaaaacaattacaatagtaacatttggatcactgatcacagatcaccataataggtacaataataaagagaaagtttgaaatattgcaataatcaccaaaacgtgatgcagagacatgaagcagcacatcctgttggaaaaatgacactgatagacttactcaaaacagggttgctgcaaactttcaacttgtaagaaatgtaatatctgagaagcaaaataaaacaaagtgtgcctgcattgattgtttttggcaatctcttactgtgcctaatttataaattaacctttatagatatatataaagaaaatcatagaatatataggatttagttctatccacgacttcaggcattcactggaagtcttagaacatatcctccatggataaatgggcactactgtaccagctttggttcaaatttttggaagagattttttttcctgtctctagccaataccaaagttgatatatgtacattttcttactgtcccgttctgcatagtgagctttttttctcatttactcttaccctcaaagggtaaatctataatgtctcagaattaggtagaagtctcctgttaaattcctaattttggatgcttttaactttatagtaggacctgaaataatggtgcttccttcaatcaataatgacttcaagccaataaaatatggtaatataatttatgatacataatagaggcctaataaatgtttgtttagagagaatggagaagggatgaaaggactaattgggcaatagagtttggatgtttctttaaataatagttccttgaccccatagatgtttgaggggaggagtgtggttaattgtactgttaacttttgtttagataagaaaaggaggagttggataagttatatatgagaccctggcaaggtgcaaagagagagaaaggcttaataatggaggtatcagtcagagttctggcaggaaagagatggcaaacctagatggatggaatagcacctgccatggcctgtttatgaactggactagagctctgtttgcatagggtaaggaccagaagctaaaaacaccattttgaaaatatctctatgagcttctgtgcatgagaagtgcagttctggggtcaaggcaacaatgatacatcccatgagacctcacagtttttgtagcacccaatcagataatagtcacctggtaaagtgctatgtgagtgtagggaaagagcacgttttaaatagaaccagtcttaggagaaacgttattccgctgaagaaactagaaagcacaggcaatgtttgcctcctgaaaaattactccatgttaagatttataggttctaggtctctcaaattagttgaatctacttggacttggggttgaaactcaatgtatagtaagttccattagtgataaaagagaatgaaaagaatatggaaagttaataggctttctagaaaatatagccatttgttattatggttcattattctgctatgtaaaaaaaaaatggttaaattgaggaagggacaaaaaaaggctctggggaaaagggtatacttttcatggtaagaaaataaagtcctgtgttttctggtgcaaggacaagttacttctccccaaggtatgaccctggcaatttctggtgaaagccacaattcctagaaacccagacccagatatcagcagttaggaaaatatgtatcttatggttaaaatgagaaagctatgttctaaggccatatgtagcaatgggacacagtcacaaggaagagagccagggtctgagcagcctcagcaaacttggtgcgtgagataagcaatggtcagaaagatggccaagtcagactcagaaaacccaggtggagtcatggcagaacaaaaggaaacaaaatccaaattcgcagacaaaactcagaaagacaccaatagcagtgagtaaagcaaggccaggcacccaaaactaaggaggatggtgagaagggtcagcccttccagagccaaagagcaggtcaaggtggtaaacaactgccgtgacaaataaggagaaaaggagctatactctctttatgttttacccacatcgggtaatgcctcatacagcatagatacccattaccgattgaatgaataaataggcccaacaagcagatttagaacattggaaacaggtcttcctagttcagccaactgaactggtttagctatcacctaaatcagtgcttcttaaactttaatatgcataaaaccacctggggattttgtttaaatgcagattttggttcaataagtctgggatgcaacttgggaatatgcattttaacacagttgtgaccgctatgctgctgatccacagatcacactgctccacaccaggatttgaataacaacagccttgacacagaagcttgaactagctttttgttaaggcataaatcaatttcaggagggaggactgcaagtagaaataaagaagcacctgccaggagtaaggaggtgaagtctagtcaagaatgacagttcttgagaggagtgatttgagaaactctcttgtgactgctgacagctcctagcccagcaagaggagacctgggtagctcagaattgcacatcaagatttttttatttttgaggagggaggggagatagaacatttaaaattgtttactcacaggagccatcacaagttttcataacctgaacaaaaatcatcacccaatgaaggatttcatttcagcacactccatctgtcttgttgcataaaaataaaagttcagggtttcttttttttcagtttaagtatgtcactacagtagagtttagtgacataaaaagatgatataaaaatagaattgatggtgtagcaaaaggtagaaatggggactttatagacatcgcagacagaattatcatattaactctttgtagtctccaattaaatacctggcccctcctctgtccttgtacttaccgtcctctatgaactatagcatttggtctccatttaaggaaaatttgcatcatgcttctgtctcttctagacacctattgatgcggctaccaagcaacagaacaacaacagcaacaacaaaaagtgatgaaacccaacttaagctatgataaacttctgtgttctagggcagtactttcagaatcacggacagcggcaaactcctgtggaggcagatctctttgatttcagtatgggccttgcagctatctccctcttgccactgtgcagaggacaaccatttttgacctgctgtaagtgtccaccctctcctgtcaattatttcccccttccctatattataggactgttccccactgtgcatatacatagaagccaacacagactttttcccataagcaggtgttgcatatatattcctagaattaggcacccatatattaaacaagttttccaggatgtatctgtagctcctagactgtttcacattgaatgcctgctctgcttcagtatgtctctctcagctactgactgtcaacctacatctgttcatgtttattaagtctaggagatggccttcaagacttttaaatgagcgacactttaggataggattcacaatatgtttcatagtataacaatcttaagatcatgtgtgagtaatcaacattctaatttattgataactgagcaaacttaagttgccattcttcctagtgtagtatagcaaatgaaaccatgtttacagcaggggattaactccatttcctaaaatcaaaattgggagtaaataagtgaggtaaaaggaggttcccaagagtgatgaaaccagacaagagaccacagccagtggtctatccttatatgaggccaatgcttacaaataataaaccgtctctgagttacagagactcaggagacatgggcttaagaagctgattgattacaattagggaaagacacattggaatgtgacagctaagaacatttcttttctttttttcttttctttttttttttttttttttttgagacagggtctggctttgttgcccaggctggagtgcagtggcacaatctcggctccctgcaactgcagtctccacctctggggctcaagccattctttcacctcaacctcctgagtagctggaactacaggcattcaccaccatgcccagctcatttttttttttgtattttttgtacagatggggttttgccacattgctcaggctggtctcaaactcctgagctcaagcaatctgcccaccttggcctcctaaagtgctgagattacaggtgtgagccaccgtgcctggcctacattccatttaatggcataatttttaggaaacattattgtaatttcctcagaataggatttatggactacaagtttcatggggaagattctccaaagctggccctaaaacctgcagtatctgagggataatggcctagaggatatctgacatggtagcattaagagaagtaagagagggctgggcatggtggctcatgcttgtaatcccagtgctctgggaggcttaggcaggaggattgcttgaggccaggagttcaagaccagcctaggcaatatagcaaggtcctgtctctacaaaaaaaagttttaattagccaggtgtggtggtgcacatctgtggtcctagctactccagaggctgaggcaggaggatcacttgagcccaggagtttgaggctgcagtgaaccatgactgtggcactgcactccagcctggatgacagtaagagaacctgtctaaaaaagaataaaaaaagagtaaatgaccataggaaaggcacagtgaagtggaacattgtcactggcagttataaggaacagaaactccatgggtctcagagtcaaaggaagacattagggcttattcacccagaaatgcgtgctaagtcaaggtcaaaacaatcaactttgaacttgggtcttagttttgcctccatgctggtttttgctaaggatccctcttggatacaagagccttcctactcatcatggaaataacagacaaaaaccacttgatgatggtgttatgagtttcctattgctactgtaacaaaattaccacaaaattggtggcttaaagcaatgaaaatgtattatcttatagttctggatattagaaacccaaaattagtctctctaggctaaaacagatgtcagcagagctgcattcctctggagactctaggaaagaatcatttgctgttacttttccagctgctagaggctacctgcgtttcttagcctgtgacccccttctagcaatcacagcaccctgacctctgcttccattattgcatctctttctttgattcttactcacctgccctctattataaggactcttgtaattatattgggcccacctggataatctgggcttctattcttgtctcaaaatacttaattacatttgttaagttctttttgctatttaaagtaacatatccacaggtcccagggataagggtatggacatacttgaggaaccattattctgcctaccatcagccgtgtcttcactgaaggacaaaaagcatttatctatgctgaacatggtgagtaactcaggacccaaagagctcaaggaaaatggctcactattccaaaagtaaaaggatttaccgtagcctagtttgtcaatttaaaacctttaaacacttaacatcacttcttgctccaagaaactctctccttaaatcattttcttgcaatacatcatcattattttttaaattaaccaaacaattacagcaatttttgtgttctgaaaacaggaacatgatagttggcttctctcccagaaaccttttacatttctttttacctatgagtgttatgaaaatcatctccaacatatgcaaccagagcagcacactagcatgctgctgtgtcctggctaaaactctcctgggatgctcacacccgagagagcctggcagaatggccactcactacttttgcccaattagaggaggattttgttgctaggcaggggtttacgcttacaaaacttcagacagaaatgctaatcagagactgaaggcttcacttctcctgcaatcagtcaagtcctgtcaattctacctccttaatctctttccatccctcccctttcctctctaaccttatgccttttctcaaggcagtgtgacacattgcagggattccccaaaatgacttgatcgtattaaccatttagggtgtatattaaacatgcagattcctaggcacctcacttaaaattcttattctaagtcttggcaagggctttggaatctaagtgtgtaataaatacgccaaagtgactcttattattaggctaggatgggcaaaactgacatgatgaaataggacgggcttagaaatcaggcacacctttgtttgaacaaacatttttcaagccaatgaacttggaaaagttacttagctactctgatcctgtaaaatgaagagttcattggttggagagttgaatggaatcgtgtgtgcatttcaccgcacacaaagcccagagttcaataattgtgaattatcttctcttaccgcccttcatgtctctccctatattataatacctgtcatattatagtttttacagctgagggatgctgactgactctgcaaatgtcacagaaagacaaccagaaacacttgtctaagtcctgtgccaggaccttccctatttgtccagttgtcagcttcatcgtgtaattacacaggctttcagagctctccctgctacacagcttcctctcattcacaagaaaatggtgggcttaatcatgtgagaccttgtacaccatcatggggatttaggctttttccagtcctttgtgattttcctttcctaaggtcttcaaactagatatccttatctgcctccctattttacctacaatcatatccccttccccaacaattgctcccttgcaagctctctgcttgaccaggtcattttcctcctactctatgggcaacaactttacaagtttgtccacaatgctttttacctgttcacctgccacactgttcttcaaagctcacatcatattgctttccataaaaccttccacaatatccctagactaacaccccaggaatacaggttgtccttaaaccttgggttacacacaagcctttaaatatgaaccactctatggtgttcagtcagccggtagtcatgggccaatgctgtctctctccttgggaatggggacctctgcttctcccacctcaacagtgtatgctgtatgaacacacatggctttgattgatatgccaggcattgtgaaatgccttctctaacaaatacttcaggcttgaacacctaatcttgagtggtaatggaacaggtttctgggagatcagaacaaatgcagagaaaacacattctaccttaaactgtactttctttccataaatatcctagaaatgctgcaagaaagccccgatactgtggaacatacaggtagaaaactgaaggactaatacaatttccagtagcccaaaggatagtaagcaagaaaatgagttgtgtccacagttaataataataatgtgttgtatacttcaaaattgctaaaagaatagatttgtaatattctccccacaaaaaagtcataagttggtgaggtgatgaatatgttgcttagcttgattgagtctttctacaatgtatacatagatcaaactatcacaatatacctcctaaatgtacacaattattatttgtcaattaaaaatacatttaaaatgagttaagcatccctttctatgcttttacagctgcctctgccttcccaaactaccccagtattcactcccccacaccttgggtagtcagccaaagtctcccactaggaatttcttgagacattccctgtatctccagtagttatcttatacccagttccaaagtgatgtctcccataccctgagctcacctccccatacacactaaattgtaagtttctggaaaacaggtaccacatcttgttatctgtgtgtcttcagcatttagcacagtatctgtcacacatctgctctggaaatggagtatgtatgaatgaagaaattaatgaatgaatgaatgacttgactgatggtgagttaatattggtgtcaaacagaaccctctgaagaaaatggtcacagtgaccaagcaaagactcagaattaaagtctttcactccatggagaaaatggtttgttggaaataaagaaagttcccaccttccaaatggaacccgtatataacccagtggaaattatgacttaatttgaggagaattcctataatagcaacatgttgtgcagaaaactgaagatacaaaaaagactttgtccttaaggatgggcctctgctatagcacagggagtgtggcatgggaagaaagtgagggttatgataaagatcagcatttctattgaaaattttagtctacacattgttttcaaataaattatttattgaaaaggcgtctgtattagaaatcagagtatctgagtttccaaaaaagaggcctcacctccgatctttagcttcttcacctgtaaaatgaaaagatctctacccatctgcctgggttgttggggggatcaaataagaaagggatgtgacagcattagagctattagaaacagccccacaaaataagtgactgaataagtcagtaagatgaattttttactgcatctgagctaagagcaggtagagcaaggctttaaaagcaatactaccatgaataaattgtgtggtgttggttaagtaatctccccttccacaaccttagttttctgatccttaaaattagagggtaagagtggaatgatctccaaattaccacttaacctaagatatgattcctaagaccaaatagagaaaaggcaaggtaagttcccgtttaatgaatcaaagaataccagcttccttggggcattcatcagaacagagctcaggtcctataaatctacatcatacaagtgacaatcagaagcacattgtcctctagcctatgttacagctgtgcttgttagcagcatgtccctagccctcattatccccgatggacctgaaccatttggccaaagccttacagggattgccagagctcatagttatttataggtgcagttcatcaaaggctttgagctttcctttgtggtgagagctgatctctttgactctcactctatacctttttcttttatgttctgtctgttctttaattccttgcatttttatgtgccttcagttctgattaattcgaagctgtacagattttaccatactgattcattggttgggagggatcaacaagaggaggagagaaatactataccaattcagcacacagaaaaccttagctcagagacctgaaatgaaggtttgagggtaatgggaccaagaagcatcacctgtgtgccaaatctgtcactaggaacttttcataggagtttatgttgcttaggctatttttatccagaggaatttgggttacctctagtttgggaagattttgcaagaattcacctgaaaaaattggaaagacaggaaatctggccacactcccaggatttctggaagagctgaacagccagggctcacagtccttattaaatagctcaagactcagaaaaatctttcagaactcagagcagccctaacaactgggtcatctggttaacctcctaggcagcagaggttcgcatttattctcatgctataccattatggcaactcagctatcacattgttttcactattctcttgctcctactcccacagctaactgctttattctttttctctgtctcaagttctgattgtttcagttagtctccattgtttatgatgagtaaaacttctacatcaagtcacctcataggctctggtcaatgtacagcttggttgtccttaaacaaggtacccatttctcgtctttcatctgtggccaggggagcatgggcatgagataccattatagcaagttatatggagagaaaccctcagaagggggctgtggcgggggtggagtagcaaatgttcttttgtgtgtgtgtgtgtgtgtgtgcgtgtgtgtgtgtgtgtgtgtgtgtgtgtgtgtgtgtgagagagagagatggggttttgctcttgttgcccaggctggagtgcagtggcgccatctcagctcaccgcaacctccacctccaaggttcaagcaattctgctgcctctcagcctcctgagtagctgggattatgggcatgcagatgttctaaagcctagactgcccagtaaagtgttcaaagtcagtgtcataatagagcctgagatgcctatataaaccaaacttctcttcctataaaaaacttatgatctataaaaataaattccaactcaaaaagcacataaacaaaggttttaagaacacttttatgtaccatgttattattttacaattcattctataccactctattattcattgactaagggttcttcaattagtgaggttcctaatgtgttaaaatacaatttactttatcaaagtgtagtggtggcataacttctaagcatcatctgttagaatgaagtacacacgttcaaggttgcattttatttaactaatggtattgctatggtattattttctgtgataatctattgcagaactgagtgctttagatacattccatgagaccagggcttttctatgagctggagacctaaactgtatttacaacagtgttaaaggctctgctcatcacagcaatcttacggtatttgattctctccatgtcttggtaaacagtgcaaatatgagggaaaggaaactgtatatttatctaagacagtggttctcaaaccatggtcctaggaatagcatatcgtcatctgagattgttcaaaatgcagatcctcaggccttaccccaaacttactgaatcacaaactttgtgggtgggtccagaaatctgtgttttaacaagccccccaggtgatttatgtgcatactaaagtttaagaatagtgatctaggatacttgtgtgagcttcctaagaccccagggagactctattttccctgagaacaatgcagtatacccataacttggctaagaacaagagtattaaaaacaagatattaagacatcttgaacaaggtattaagacattaagaacaagtattaagaacaaggtaactattgtatctctagttagttctgagtgagggtcaaatctgggaggaagccctacctaaggatgaatgccatatacattggttctttttcaccattctctgtccttcccttctgcttcagcaggctgcccctgaccccacctcatgtctaatctccttcagtttcctacatagaattttctcctacttcttctgtcaaccccaagtccaaatttcctttcagacctacttcaaaaacgactccctacaggaaatggtctatattgtctctcaattacatccattaagcatttattaaacacctactttttttcctggcacaagttaaagagacacatgagtatcagacactgttctcatgtccaataaggatgcacaacaaatcacccctctcctttgctttcactcaaacctttctctgcagttcctagtaagttatcacataatttcactttggttttcaccttcttccagcatatatttatcttctctgctgtttgacaggtttcttgagggcagtgaccatgattttaaactcatttgtacatagtatgtttcctaacagcctactgagcacatgctggggacatgttgggtttaatgaatgagatcacaaaacaatagtatagacatgtgcagaatggattctataccttcacagtaagtctcactgtcttttatttctctgccttttgatccaccccttacccactgacttgggctacaaaccaataaaatcctcaagacaactcatttgcctaaaggtggattcatgtttctctatgcggggctggtgaggaatccaaacaagtgccaggccagccactgggccaaatgacaatccaccaaactcttaattaagtttaaaaatacatcttaaatactgttctttggtacccctttttttggttggaatgatgtttgggcttaaaaaaatatcttgtagaatcctgactcagggccaaaggatgaattggatgccatcaattaatggagttagacagaacctgccaaataaatgacctgtacatgaccagaaagacacaaaggggagtgatggtctgtttagcagtgatgaggtgtccaaatttttcagctgaactaggttacaggccaagctgtattctccaagaccagctgcctaaaggttgcttacaaattcccttttgactcacatgccaaagcaatacttaggtttacagagcacatacctgcctgccaaggtagttatttgcaaatatgaacaacgttttgcaaggctcatatttgccaattttcccctctttatagatcaaagctgcagagagcatcataaaaactaaacttctaggtaaagacagaaagaaaagaaggcaagattcctgtggctctcttggaaactcatgctgagaaaatcatcaccattttatccataggatgttggggtcttgagtcatcagaagactttggtacctgctacctgatcttggggctttagtgaagccacaagaaactagaaggacttgccatgaaaaatgtatggttttgtgaaaaacagagatgagatggtaatctcacttaggctcactaaggttgtcagtaggaggaagaacctctggtaagaaaaagaagctcaactatagaacctggaattgctaaaactattcactaattagcagcctcagatgtactctgttttcaaggtaactcaacttcccacttaactctgacccaaccatggactcctctgggtactctgtggccaagctgtgacaagaccagatcattcaaaccaaatgtctctgaaagacagaagataacacagagaaaataaatctaggagttgtatgaaactagaatgatcttgtttacaagatacgacttcctcttcagggcttgcagttctgcagcattgactaaggtaatgacattcaggtagttcttttcctcctagcacacatgctaccatcagtgtgttctagacatacatgcctcctgactcagcagactggagaccaacaataggaaataggttttaattttatttttcagctgtgatcaatagacaacaactaactgctatgctggattgaggaggagtctaacgtaggttttatctcagctcagtgaggaaattatatgatggattagtgatgtcttgcatggatgaagataagaggataaagagggagtaatcgggggatgaatgataatgcctgtgcccggtatttgccatcctagtctagatctaagagagagatgccaagagagaggtacaggattctctctttcaccactctatggatctgactcctcttccatgacaaatatgtgaattaaggcctcctcacttcagggaaaaccttacctaaccacagaggcccaattgccatgtgcaaccatgttagattattgcatagtagcttcaatattcacacaaaagaaacactagtattttttttttgacacacagtcccactctgttgccaaggctgaagtgcagtggctcaatctcagctcactgcaacctccacctcctggattcaagtgattctcctgcctcagcctcctgagtagctgggattacaggtgcccgccaccacgcctggctaattttcatatttctagtagacatggggtttcaccatgttggccaggctggtcttgaactcctgacctcaagtgatctgcctgccttggcctcccaaagtgctgagattataggcatgagccactgcacccagcccatttttattcctggaatgaattatgacagttatcttagtcttccttttggtcacacaaaacctggagtttctaaagttacaaatagctatcacaggcaaagaagctgacccttctgggttactgtaagctttgcaaaacagtccatacttggagagaaaacctgacttgggctcatttaccgtgacttgggcttatttgtcgtgacttgggctcacttatccttgctcatggtgaagtttataggcatttctcatttctggcaagctgagagaggaggaagagttacaaaatgacttcagtaaggggaaactattgcaggagagtgcaaattgctagttttaaatacaaatgtcagaagaaagtctaagtgaaagcaggggctggtatgcaaaggaaaacaattatgaatggggaagacctaaaaaaaaaaaagacattctagatcaagaggaaaggagaggtcctccatatgcccacacaaaggacatcggttaaggatcatgctagacagcaagattggactgaatctcaaggtgtagcaaccagcttatttaaataagtaagtccaacacttatagggactttagatctaaacagccaagagcaacaatcaagacagggaagtgctgaaacatcacaagtcaacctccatattccacatgtggcccaatgacaagcatttatacaatatgattgattaccctgtagtttactttgtcaatcagtcatgaagttaattacatattactcttgggcactattataaataagggtatagcaaatagtgataaatttaatggtccttagcattcagctattaaattgatgacacagtcatatcagcattgatgaacatggactttcttcatcaaggataatttatatcaataagtataatgggctatctcattctcctttggccaacacattattcacactgttataggcagtgaatctattagtaaatgaggaaaaaatacgttttgttttctgttttttaaaaaaagactcctgataaatgctgattataagaaaacaggaattttatatcacggacataaaggttaaagaaaatgtgagctcaccataaaacttgctgaaatggaaaattaaggtggattctaaagagataacctgcatccaactgtggcttctccaggaggagcctttgaattgtcctgttcacctacctagaatgctcttgtcttccatccactccccgtacacttggatgattccattcctccatcagtcattgttttagatggcatgtcttccaagaagtcttccctgaccttctggactgagtaagatgccaatcttaggtcaggtcctccagaagcaaccctgaaataaggattcatgtgaaagtgtttccagaaataacggataggagagtggaaaattaggaccagagaggagaaggagacaagcaaaagtaggatataaagcaaaatctcaggagaattttggcccaatcctgccagggatatctaaaaacagtgtagtcacatctcagttgtctcaatgaacaacatttaaaccttgctgtgtgtcagtcactggtaaggatttctccaagcacttccagtactgcacactcaaggagaacaatctagcagtctcaggacagccctccaacaaagaggctgaggtgctgagtgttgagagagaaaagacatcaggaactctggtgtgcctcaaaatgataaaggaattcaatgtgacagagtagaacatattgatagtatctgcttcactggccctgcaaagggttcctgtagcaccctgaagactctctaagatagcatttacaatgctgcattgtagttgcttagttacttatctgtgtttcttgctagattataggctttgtgatggaaaaagcaatggctgccttgttcatcattttatctacagtgactagcacagtacctggcccatggttagtattcaaaaaatatttgtgaaaggagggaaaaaggaaaggagagggggaagtttgtttggtggaagtattatactagtgtaatacattacacactcaaacaaaaacgaatcttggtaaaacattattcttaaaggaattatgcaaacctactttactcattctgagcatgaaaatcttggctgtaaaagttggatatcgtccatgcagcccaagagttcatttgtaacagtccagtaggggctcttatatcaactagatgaggggagaataataaaactcctggtctggaatgaaagctatagccattttactatatggtcaacctgaacaaacacaaatatggcaacaataatgtttatattaattcctagcttgtttttatgaaatattcttgaaaattcttagctaatgtgggctagagaaccagctccattccaatcacatctagattgtattttaatctttcattattcccttacatgtatcatttaacatgtattttttaaaaactaaattctcagtggcttagtaaaatgaagatgtgtttcttagtcaaaaaaatctaatcaagtttttcttgggcagtcttcatacaatgattcaggcatcctggttttaaacacctgtgtctttatcatcccaccttcttctaaagcctaaagtctcacacctccagctggtggataggaaaagagaatggagagagcacacctcattcctaactactttagtccagaggtgaaacacatcacattcccttgacggtgtctagtcaaatggctaggaaatgtacccacccatcaataaccctacactggaaagcacaaatatttggtggatagctaaccaaccatgtcgttcattcaacaattacttgtaaagcacctaaaatatacaaagttccttgttagctgttgggaataaaattgtaagttaaatagaagtggttgcagccccatggagctagcttacggttttgggggtaaatatacattaatcaagtaatcatgaaaacatatgatcccaactgtgcaatgaaggaaaagtacaaggatagaataaagtttataacaagctagatctagcctgaatacctgaggaaggaacatatgggctgatatctgaaattggaggaggagtatctagaaaaagttggagagaaaagcattccaggcagaaggaagagcatgtgccaaggccctgacataagtaggaaagaatgcctgtgtggttgaagcctgacagtgagaaggaaaatgggggtgtcagggaggtgggggagtgttgtggaatgaggctagagaagtaggcagagaccatcaggggtctacaagctatggtagggattttagacttcttcctagttctgttgattcttattatgtgtttactatacccttctagtcacacattggtttatgaaggttgtttatatacatatattcatacagaccttcactgttcttgcccttcctctcagttctccactattatcaacctcctagagtatcctttccttaaggccagttgatttcaatgaaagttgtcttcctccccttggctccatttcagcaggcataaccaacactgtgcagtgccccaggcacactgtgggttctcatatctcagtgcatttagcacacacttgctgctccttgtacctagaagacccacatcctgtcatacttcaggcttcattgcattcatccttcacaactcagcttccccactcaattctactgtaagtccttcactggctttcctcaaactcctggctcagtcagattgctatccactccaaacccaccgtactccacattaaatgcaccactagcatagcacttattaaattgtgtagttggtttatttgaactgacttcccctactgtgttccaagtttttaaggaaagggatagttttcattttcatttccatattaccggtgtcttgccattattttatacatagtaggcactcaaaatatagcattaattgaatgaaaaaaatatttctcaaacttctttcacaagacactaatgtcactatgagttttacctaaattcagatacataaacaagttattttcttggccaaataagttggggaagattgtatattatgccctaatcttaacaattattgacaatgtagtagatgtatagaatacaaaatttaaggaagcagctgctgtcagcttaatgcaagcggcaaccctgcacttgtaataccctaagaatgactgcttccttaaattttgtgcccttggtggctggtttacctcctcctagtaataggcattgcacattgtcatttcaaaggctctcagagtttctgcaatagcaaaaacggtttaacttctatcatctcagggtaatccaaatgtatttgaggatctggccctttttaatttttcattaatacctattaacctcccatagtactgatgctctttgaaatgaacttttaaaatgctttgccactatatggattaatacatttcgatgtgtgctttttcaaaaatgataacctttatgtgggagatggatttagatagaaacttgggtccatttatcaaaaactacctttgaaaatacgttgaatgttatgatagccagaagaaatttctaattaggttctaataatgttgctggcctctcaaagtagttatagatgagaccactttaaaaggagggccatttccatcagtgaatggatgggtttacacttccaggtaaagaagatctgttttatctctccaaagacaaataaatctattggtctgtccaatgatgggatgaaatgagaagaaaagttcaattacttgggaaataagcctggtgggataggtcagtggccctgcttaacactgccaaaatctcagctctctgcttgtccatcttgcaaatgtgtgtctgactccatctcggtggaaggaataggatgtcttcctggctgactcaaagaaccaagtcattttatctcccaggaaagtgatccacccaaaagtctgtctgtcataattattgtttagaggaggagaattgcttctctttgacaaacagagtttcagtggtagcaatgttaggctaacagcttagtacaaatttttggttttcttgtttcatcgaggaacttccaagctgtttttctcacactagataactaagcatcataactcagtgagggaaagattggccagaaatggctgaatctatgcagaaaggctaagtgatgtagaaaataagcttctgggaactgaaataaatcacgtcacaaataactaaacaaaatttcaggaaaaaagagaaatattgtattatcttaaacttggtttccagacatttagagggtggctggagtaagtctacataaggtcccagccagcagccaattctgcagtgaggagaacccaggatccagacccaggtcagatatgatggttgcccagtggagccaagactgagagaatcccaaggattggcaaggccctaaaatgtcctgatgattttgtgcccaaggataaactagacattcagcccaagtaatccaaagaaatgtcgtggacactagaccagagcagggaccatgacgaatagtagtgataaaacggagggtccagaaccacgtgtgtgaatctggctagatgtctgagtgtcttttcattatctgagggtggtcagtccaatctactataaacacccagaattggcttggacatagcagtagcaaaactattttgtgtggatcattcatgtatgattggttaggagtagctaatttctccatgcttttgggatctgtattgttctcttattctaaaacaaaatttcaagtcctgaacacctatggtggttgcattaggcaataattaagagaagcaagtaaatgagttagaaatacatagtaatcaagtttcctggctgtgccaagacttcctcctgtctgtcagtaaatcccacattgcccatttgtggtttgcagactgattaagctatacaaatggaatcatctgttcttttctggtcttcaagcgccttttcctcctcagggatccaacggaaggttgcctccaggcatcaaatcacagcaatcaataaaccaccatgagtagcatggctcatttagaaacagagacacaggcattttgctagaagaaacaatgattacctgtcatgggttcagagacttatggtacttattagaagtcaaagaatgtgagacttttcatggccaaatattaaactattccttggccctcaaacctgttcttactgtgattcacatgtaggtgaatggtatgttcaatgacgttaaccaaaagtttggggagtaatctttaatttcttcttcctccttttcttctccctcaactccaacatctacatagatattgagacttatagttttttcttccttaatatctttataatctttccagtgtcacagatttacttcaaactctcattggacttctatttcccttcccacttcattcattcgctacttaacagcctgagtggtatttctaaattgctactctgatcatgtcatttctctgtttaaaatatttcacactgaattgcctgcagaacaaatatgagtccataatgaatgactctgaccaaataattctatggaatgctctagggcttagtaaatgctggggtggattgactttataaaaatagtgaaatacatagattataagatgggaacaatacacactggagactactagagagagagaaggaagagggtaagggctgaaaaactactcattaggtacaatgctcactacctggaccacagaatcattcataccccatgtaacaaagctgcacctaaaataaaagttaaaattattaaataaataaataaataaaatagcattctgtctcagctttcatataatcagtgcacagaaagttacataaaacatagcagacactcaaaaactattcattcaaagaagaataaatgagccatgcaagagaataagatttaaattctaacttcatccctttctagcttaataatctcaataaagttacctagcattcctgggcttcagtgtccttcaaaatgtggttaccaacactggtaggattaaatgagatgtacttagaggacttagccaatgacttagtggcacacagaaataatttaaacgcagtctgtattagcagcaaataggttaacatgacaaaaggtatgtacttcttaggcgtcacctatacagggtactttacaagaaaattggggagttgtgacctctgactgccaagacttggaacccacattgcacatatcacccctgtattagtcaggattctctagagggacagaactaatagactagatatatatatataaaggggagtttattaagtattaactcacccaatcacaaggtcccacaacagccatctgcaggctgaggagcaaggagagccagtccgagttccaaaactgaagaacatggagtccgatgttcgagggcaggaaggattcaacatgggagaaagatgtaggctggaatgctaggccagtctctcttttcatgttttcctgtctgctttatatttgctggcagctgattagatggtgcccacccagactaagggtgggtctgcctttcccagcccactgactcaaatgttaatctcctttagcaacactctcacagatacacccaggattaatactttgtatccttcagcccaatcaagttgacactcagtattaaccatcacaacccctaatcagtcaatcaaaaggcatttactcaggtctcatcatgcaactggaattcatgtttttcaataaggttaggaaatcttccctccatatcaaatgaggattttgcaattttaaaagtttagtttgatgttccagtggaaagatcaacatctgttggagttagagctatattaagtagaaattaatgattttagagtttgccttctaaaatccctctctgttagaattgtctttagtgagccattatcatctagaatggatccagtgacatagaacagaaatctggaagtgtggggctctattaataagaagtatgatgcaattactcttccaaagttgatcaagtgtgatcccactgatagatggaatgacaccagtaaagaaaaggtaaatccttagatttctaaatcattttaagaataggacaagaatttaaggaatattaagtccagttctttctccaggtaagacagcctttagcccctggaaaatgaagaatcctatcttaaaaaggtaatggccattctctgaccaatgcttcttcaactgaggactatgcagaacaattgtttttgtaaatcttgattggatttgaaaggaaaatcttttcagaatgctgagactctttcttcaaaatgcctgtctcctcatggtgtctctccaatgtgagatgtggacagatttctgttttgtttcacagcacatatggcagatactgtgtctcagcctcttgagctctggaactagcacagcctttctgtcttataaccctggggttgtaaggttatgaagttacaaattatgtacctaacctaaattctaaataaaatatggatttctatatcacttcctactgatactctaaaacatttgaagagatttattacttacttagcatttgtgaaaagtgctccaagattcttgcataaaaaatccatcacattttgcttttgttcactcactcattcatccaagcaacacttattgagtccctattaggtgcccactttaatttttcattttttccaagtataattaatgtctatttttaccactagactgtaagatttatatagagattagtccatctatcttcccatctttattgctgtttaaattgcacttatgtatcttttttgctgttcttctatatactgcacatatatcatttcccaacacagtgtgggtactcaataaagacttgataatgagtgaaaataaaccatcaaataagattgcttcctgctatgaaacagatccaactcatccaaagtaggtctagaaaatacagacaggtggagatataagtcatagagacagagagtcctaaacccaaaaaaattgtaaaggagagatacttataatttcagaactttttatagcagtgcttcatcagatgttaaaagtagtatgcatcatacctcaacagccaactggtctattctgccttattgagtatctatgcattaactaggaattgtgttcatatttgcaattcacataataaagtttcctgaatccaaccacccatcagtccccaaataaaataactggttctcacatagatattacacctgtaaatttggtagaagagagtggtacaggttgaaccagtgcagaatgactttgataatgaagacagagttctcattgaaagcctggggcataaatcactgtcaaagcctgtctctttactctgtccacacaaccatgggagtttcagtcctcctaaggagtagtgaggtgtgaagttaaaaggtttggacaagcatttgggagcctctgaggcttatctgagctaaccaagcctcccaaagccataaatctccaatgaaagcttccaagagtgacatatttcttgtggaatgtcccctagcttggctgcaatccagaagagcagggatgtgtgaactgacaagataaagccaacatacccattgcccttccatctcctcctgggcatttcttagtctggcttttgtgagtgtagtaacattttaggactgtatttgcctacttacagcaatactgcattgaattatcttaaggaaacaggatggcccttgattgttgttttctctctatggatgggttttctgttgttgttgttgctgttgaattgaagaacacagtgggagccaggacataattgctaccatagtcacaaaccacagactcctgggtattctgtgtagtgtttctgaatatgtccagagaccacatgcatccaaattagcaagttgcttgcttcaaaggcagattcttgtaacccactccagacaagttaatcagaatctctggaggtaagtcctggaaatctgaaatttaacaactcttcttaggtgtactaaattcttagacataaaaactttttattgtggttcctccaatgcaaattagtgttttaacagatgaggactgagacccagaggaatagaatgatctgcccaacgtctcacagctggtacactgggacccaaatctgtgccttcccaggtctgtccttgattctctacaacatcccccgcatctcctagggcattcaccaaagcatagcacgagtcctatagagaagtgctttgagatacttgcaccatctctggggcatgtaatctgagggaagaagagagccttaactggacagattacattccaattctgtgcaggctatcatgtaaacaagagagtagagaaagtatctctacaccatccggttgtcccttcaggctcccagcaaattttcctgctctacctgtccttaccttatgcttagaagagggtctggtattagtaatttgttcttctgtataaataagataaagaaatgttatacttgcatatgttgtttaccaggtactaccaggtttttatttgctcttggaagccttccctgactatctgcagtgaacactcccagacaacccttggtgcaacctccatttttgccacctccactgcatcactattatttatttgcacgtccatcacctgcactatatcatcagcatcttgagggatgaaactgtcttgcatttttatattctctttgccagctcaattcctagtctattgtagttgataaaaaaatgtgtgtgtgtatatgtgtgcttgtgcatataataaatccttgcaatgacctggcaaatagaacaaaaagtaattcccaccatagagatgaatgaactgggtagccaaaggcaaagtgatatgaggatgattacctagttgtccagtgaaacagaggagatttgaattgaattctgaatgaccccgagaatgctgctgtttccaccataccagagcactaccaagttccctttcaccatcaaagtgttctctctcctgaaggtagtgacttctttaaccaattctctgattttggaaaaggaagttttgccccattaatgaaaatgtagtgcattaattaaaatgcagaatgtaaactgagaactgatttagaagaaaaagaaaaagtagcaaagtccacagccagagagtctagaatcagatagagagcaagatataaggagcacatagaggtaaatggtgcgacaaagtctgtaaaagaagtttatgctttgagatgccccttctactaaataatatggtctgagtttcaggattagaggaagccttattagtctggacacatgctgctaataaggaaggtggtataaccccaagacagcacagagcactccacacagatgttatgccctagatgctccacgtttcctctcgaggcggggtcagagtgggagaataggctaggcagggaaaatgagtggcggatgactgtgcacaaactcatttatgaggcctgtagctggtggtatgcccaatatttataatagatcttaaaacaaagactggtggaaagacctgcattttacttggtcttgctccatcaagcaaagcagacttctgattcccctccccttttaaagttaacccttcaatcatttccttgcaagtttcaaacaggtctttggacacattcatctacaggtcacttggctacttcatggcatggatcatgccatacccttctcctatgtatcatctcctgtttgtactacccttgaggctaataatagctaagggcccttcttcactgtcattgtattagaagctcacatgaagcattaacccataaaccagggagagtcatgttacatggatcccaaaaattccagcaccatttcctctctttgctgttgccttggtgcatggataccttagtgtgtgaatatcaatgccatctatggctgctggacatcccagatgctggtacttctaccatcctttcaccctcagcccccaagaaacaacccaactgcatagagatatagatcaaccctcaggatgcccaaaactggattcctggggctcttgtttcatcaaaatcacttcctctgttctcttgacccatgtcattatattccttgctgtttggggaaaagacactctttaaagctggctttgtatttatagccacctccctagaactgagacatgagtctgtggagacagagcctggggacaaacctgagtaattgtcaccagactttacttagctgtgcctcacccctccagcatccagttcttttttcctggacccatcttgccagcatactttcacctcaccttaggttgagtccatcagaagatactcaggcccttgtacagacagatttccactagtcctgcccaccagtctagacaagggatgaacatgactgaggccccagcccagatcaccacttctggaattacatctatgtaattttgatttaagaaattctctccttcatttaggtcctatttatggccatcttatagggtctaccctctggtaggaagagttctatttcattctatttggcattctgcactgccaaattcagaagtccaaatcagagtgttcatgttgtaaatgaaaggttttcttttaactcccatcctagcagctaggttgatgtcagagggttgttgtcaagtctacagtgagaaaaagacaataaaattaagggacaataatcaagggaacttgacccctcttcccatgtacacaactggccaaaatctacccatattcaagtcacaacctccaaacaagctgagatatatatttggtattattttcatagatgtttacagtcctgtacaaagcattaaactaattttgtgtcaaatgttgtcactgaatttttaaagaaatacatcattccaaatactaaattatggatcaaattctcataaatccctaataattggtggacctaattatgattatatgtatttgcctaagagctccataaaatgataaagtattgcttgacttcctaaaagctacagttagaagactggtctagactgagtggtatgagaacacagtttgctttttacctttctgacccaattggcctttaattttgatggtctgcatttaaaattcattttgtgagtaaacccagcgaggctcctcctccatggaccactttgggtaatttttttttggcgggggggtggggggacaattttaaagagtgtctattatcaaagagaaattttaaaacatgtatatttataccatgtggttggacatcgtagaattagctggtaaaaaacaaaagaaggaaaaaggaaaaagtgccattggaaaggtacatagcagaagtaaactatgaagctatgtggtatagtgaaaagggcccaggatgtgaagaaataaagccagattcacggcctaattcaattcttgctagctctgtgttttggaataaatcaccttcagttgctttattgtatttcgggatcatcatctataaaaaatggaacctcccatctcatggacctctggtgaggatcaccacgagacaataaacaagtgacttttaattgtcaaagggatataatgatacctaacaaaagaaaacaaagggagtattgttcatcaggtattgatagttaacaattttattgctttaatataattatcccaggctttggaacaaagattgaaaaagagataaagatgcaataccacataactggagaattttagacaggatctcagagagcattcattccaattctcatttccagacacatattttatagagtaggaaactgaagtatggaggagttgagaagcttgcccaaggtctcacagcattatcctgagagcttgaaatagaactcaggtctcctgctgtccagctcccagcaacctctacaatccctaaagctgtttctagaatcccatctcttcgatcctgtgcctacaacccatgtcaacaaccattaaagcatattattcagttcaattgcctcctttaataattaaccagtttattacaataccttcccttccccttgcagtgcagagacagggccaaacactcagagaattgtcatagactcaactcagggagaaaggcctcttttgtttgctcatcaaacatttatctgagttcttacttgtgccccaaaactgtgctaccttgataaaaatctcagtgatcagaagtccttcaagtggtggatatactcacaagccagtgattaccatgtaattagcaatatgttaaagcaaatataaatggattacatagaagcttagaacatggtatgactaaggagccaggagaaatttgacagagatttctactttacctggaaaaatgataagttgtgacataaaaaaataaaaattttaaagccaagagaaaaagaacatatttcctttaactgtgagaattgtgcactgatcagcagcagttacgttatgtgatgatcacagtttggacagctggtttctgcccaccaggaactgaatcagattcagatcatttgaactctgatgtcaaagtcagtcatattttcaacaccctggatattctttttttaattattattatactttaagttccgggttacatgtgcagaacgtgcagttttgttacataggtatacacatgctatggtggtttgctgcacccatcaacccatcatctacattaggtatttctcctaatgttatccctctcctagcatccccccaccccacaacaggccctgatgtgtgatgttcccctccctgtgtccatgtgtcttcattgttcaactcctacttatgagtgagaacctgcagtgtttggttttctgatcttggatattctataacagcagtagttggttaacccctctgttcttagtttcttcatctgttcagtagggatgataataataatgtctcactgagaggattactgtgaagattaaatgagtcagagcatgacaaatgcttacaacaacacctgggacaaagtgagtgttcaataaatgttggcattttagtatgagaggaccaattgagtgtcactgaaaactcgtttcagaatgttactacatgaaaaccagggaagaggtgaagaaagttatatcagtcagagttcctcccaagaaacagaacaatgaggatgtgcatatattaagacatttattgcaaggaattggctattgttgggggctggctaggcaagtccaaaatctgtatatcaggccatcaggaagggcagactggaaattttagggcaggagctaaagatcctgtccacaggcagaatttatccttcagaaaagcctcagtgctgcttttaaggcttttcaattaattgtatcaggcccatccagattattgaaaaaaatttgctttacttaaatttttttttttttttttttttttttttttttttgagacggagtctcgctctgtcgcccaggctggagttcagtggcgggatctcggctcactgcaagctccgcctcccgggttcacgccattctcctgcctcagcctcccaagtagctgggactacaggcgcccgccactacgcccggctaattttttgtatttttagtagagacggggtttcaccgttttagccgggatggtctcgatctcctgacctcgtgatccgcccgcctcggcctcccaaagtgctgggattacaggcgtgagccaccgcgcccggccgctttacttaatttttaacagcttttttgaaatataattggtgtgtaaagaattgcacatacttgatgtgcacaatttgatgacttttgacatacgcagacacctgtgataccatcacaagctgattgacatatccaacacctccaaaagtttccttgcatcaatttacttatttatttgtttgtttgtttgtttgttagaacacttaaaatgagatctactcacttaacaaattgtgaagtgcacaatactatactgttcactgtaagcactatgttgtatattacctctctagaacttattcatctaacatgactaaaactttatacttattaaacaactccccagttcgccaccttccagcccttggcaacctctattgtattctctgcttctatcagtttgactattgtacatgcttcatttaagtggaatcatgcagtatttgtccttctatgactggtttagttcacttaacataatgttctccacgctcacccctgatatggtttggatattcatcccttccaaatctcatgttgaaacgtgattcccaatgttggagatggggcttggtgggaggtgtttgggtcataggggtggagtcttcctgaatagcttggtgcccttcttgctgtaatgagtgagttattgctttgagttcacacaagagctggttgttaaagagtctggctcctcctccctcactctctcatgctcctactctcaccgtgttacatgctggctccccttcaccttgcaccatgattgcaagcttcctgaggccctcaccagaagcagatggcagcaccatgctttctgtatagcttgcagaaccatgagacaacctaaacctcttttctttgtaaattacccaggctcaagtataatgatgtaagaacacactaacacagtccctgttgtcacaaatggcagtatttccttcttttttaaggctgaataatatttcattgtatgtatatgcaccacattttctttatccattcattcatcaatgaatatttaagttattaccatacctcagctattgtgaacaatgctgcaatgaacctgagagtgcagacatcctgttcaagatgctgatttcacttcttttgtatttccaccccagtgtgggattgctgaatcatatggtaattctattttaaattttttgaagaacctccatattgttttccatagctgctccaccattttatattcccaacaacaatgtacgaaggttccaatttctccacatcctcaccaatacttgttatcttttgtgtgtgtacattttaaaaaataatagccaccttagcaggtgtaaggtggtatctcactggagtttgatttgcatttttctgataattaatgatgccaagcaccttcgtatacacctgttggccatttgtatgccttctataagaaatgcctatccaagtcttatgtcaatttttttaattgagttttttgtttgttttgctattaagttaagttgtaggagtttcttgtttatttagacaattaaacctttatgagatacatggtttagaaatattttatgccattccataggttgcccgttaattctgttgattatttcctttctgtgccgaagctttttagtttgatgtagtcctacctatctatttttgcttttattacctgtgcttttaccattatatccaataaataattgccaagaccaatgtcaagactttatccttatgcattctttcttctaggagctttatagtttcaagttttatgtttcagtctttaatccattttgagctgatttttgtgtgtgatataaggtataggtctaatttcattttttatgtgaatatccagttttcccaacacaatttgttgaagagctattatttccccattgtgtattattgacacccttctcaaagttcagttgaatatatatgaatagttttggttttggcctctctattctgttctattggtctatttgcctatctttatgccaataaacaatattttaattattgtagctttgtaatgtattttaaaatcaggaaatgtgatgccaccagatttattcttctttctcaagatcattttggctattctgggttgacaaaatttaatacaatttcatgataaaatcactcaacaaactaggtatagaagaaatgtaccttaatataataaagaccatctatgacaagctcacagctaacatcatactcaatagtaaaaaaattaaaagcttcttctctaagatcaggaagaagacaagtatgcccactctcatcatttccatttaacatagtcctggaaggccgggcaggcgtggtggctcacgcctgtaatcccagcactttaggagtccgaggcaggcagattacgaggtcaagagattgagaccatcctggccaacatggtgaaaccccatctctactaaaaaaaaataataataataattagctgggcatggtggtgtgcgcctgtagtcccagctacttgggaggctgaggcaggagaatcgcttgaacccaggaggcagaggttgcagtgagccgagatcatgccactgcactccagcctggcaaaagagcaggactccatcaaaaacaaaacaaacaaacaaacaaacaaaccatagtcctggaaattctagccagagcaattagggaagataaaataaaaggcaaacaaatcagaaagaagaagtaaagttatctctgtttacaaatgatataatcctatatgtacaaaaccctaacggcttcacgaaaataaactattagatctaataaagtaattcaggataaaataaagttgcaggatacaaaatcaatatataagaattagtaacctttctatatatttacaatgaaccatctgaaaaggaaattaagaaaatacttccttttacaatagcatcaagaacagtaaaatacttagggatagacttaaccaaagagttgaaaggcttctacactgaaaactacaaaatactgatgaaagaaatcaaagaatacacaaataaatggaaagacctttcatgttcatgaattgaaagacttagtgttcaaatgtctgtactacagaagtaatctatagatttgaagttatctccattaaaatctcaaaggcattttttacagaaatggaaaaagcaatcctaaaattcatatggaaccacaaaaccttctttactttaaagtaaactgattataaaatgtttaaccacatatataaaatagatgattgttgtttgattgaataactgggaactgctagccagatagccttgttgacacatgaagctgaccatcacaaaaagctagtgtacaataagttggcatagcacatttcttttaatgggttcaaggcaatcataaaacaagagtaggagggagtaacccgatccctcagacccacttatccatgcattctacagacagagctgaagaccccagggacaatgcacagactacttggctttgcatccttttgtgtggaaacagtgagcaggttcttcctctgtactgtttggtgtgctcactaaaccttagaggattctagtagtttacagtttcaatcaaagaatggggattttacacagagcagactcatgagaccttgattctaagttcctgcttctattaagaggtagcatggcataacaacaacagtaacaaatatatatacatatatatgtgtgtgtatatacacacacatatatatgtatatcagctatgacattagacacctgggttcagatccacttttgtcacttaccaggtgtctagtcaagtcacattccctctccaagcctgtaaattgcacctgtaaatggcagttaacctgtaaatagtaataatattgtcgtgtcatggttattgtaaagaattaaagaccataaacacaaatggcctgggtttataaaagatgctcagttaagacaagctatgatgcttaacttcctttatttcaaggattacctagtgttagttgtgtagtttcaggaaagttccttcatctttctgtgcctcagtttcctcatctgtaaaataagcatacaataagttgttctgtggactaagggagttaatatgtatgaagtgctctgaacaatgtctggcacatagtacgcactatatactttttaactattataatttgtgtttgtgtggtagtgatgaaatcaaggaggtacgaaaaccagattttagtccactctgtactgggtgaactggcagaagtcacttatctgtcatcaattttcttttctgtaaaaggagggggttaattagactatctgtcaagcttatgcatttttaaagatattatacctaaactgctctgtgagatgtaagaacctgagaaggttttctggcttgtgatagttttgaggtgctatgctctcacagatgtgtcaaggccttcttattgattcacaccaaggactctgcctctgtctcagtttttctgcagggtggttgatctgtttacttttcaccaagatgcgttcctctgtcagctgcatcagagctgtcataagccagcttcatgccagggagagaaggaaagacagtgtttttattggtctgtttcactgtgtctttcttcctttgggatcccttctcagaaaggtcaaaataaaattctgcaactgccctgatgaggaatgctagctgattgaagaaagagacccctgtaagcagcactgcctgctgctgagaggcccctgatggagttctgccaagcctgactcatcctccagctcagggaggcctgctggtcactccctttctgccccagccagagagcacattgcaaacatcttaaagacttgaggttggcagcttaagggggaacagtaattcaccaaagcatgatggaaaatctaatggagggcaatgaaggggtgaatgggatgtgtgccctgtcccctaaagaagggaactcctgctctttcccatttcagggtagtgttaaaaaaaagttgctcccacttcttttcttctatttgcttctgcctcctttgcctttttatttgctccttccaaaggtaaaagactaagtatctgatgtcagatgcaggcattcagtgagctgtacttactatcaggcaaagttatgagcctcaaatacaagggcccagaaaccactcttcttcctctttctatgtctaagcccagcaagatttcttctgctcctttctccaggtaaggagtgtgtgaatgccagggtcaataaggaggggctggcacaaagagagaaaaatatctgattgtaacagcagatcaattcagtgttctacaatgtgatgatcacagtgcacatcctgagtgattttccaaattactgaatcatttacttgttccactgttcattgaaaaatgaggtagaacttcatcctaccttgaattaaagggcttcccatcactcctgtcaaagctacattgcattgcatagcatttcaagcagaatgagctaagcctttcattgacttcattttgtatcctttgtgactagaactaatcttagcatttctgaattagaagaaagtttaaaaacatcccaccaaattttccataactgtctgcttgactttactacattttttgcatgtggtcctgcagtttctgcttgaacatttccagcaataaaacactttttaacaaacagattcctttgtttggtacaggtttattggaaaatacttcctttgttatttctttgtaacctcttaaaattctgtttttcctacttttggaatcagaaaaaaataaattgtaatgcctattcctacgatagtactttaagtacttggatggttcttagactaagttatgctgcagtaatctcagtggctgaaaataacaaaggtttatttcctacccacacataggtcatctgagagttctgtactaccctcacttagggactcaggttggcagaacagccatggtatttccgtggagctccactgctccacagtatttctgtagagttccacccctagatttacctgtcaagctgtctctccacagtcctgctccccattcagttcttggtcattgcagtgggccatctcatgctgctctctggtctgctttgtccccacaacatggacacagcccctctcctttattctccaagtcaccatcagcataatgatgttatgggtagcagatttgctggagtcttggggttaatggaagaagggcaaattgggagaggggaatggaagggtgacgtatataaataatctcaccttgaaaattagacatcatagtttccaaaattccttgcctgtctctcccctcctcccaccccaaacttgggtccatcttcagccctctgaggaaacccaccctaatttcttctcaattctcatgtcttggtcccacctctgtgtctctagttgttatcaaagagaaaattcaacttgaccattacctttttcagcagagaaatgtagctccttttgtcttaatctcttccattcttatttattctaatgaattctccttcctaaccaaagggcttcttaatatttcttaggcaaaataattatctgccaaatcctccatatttaaagagatagcagaagctgagaaattagtttttcttgatgtcttaaaaaggtcattgcaaatgtttttcattcctaccgaccccattttagagaaactttcaaagactgtaagtgtgagggttaatattaggggtcaacctgattggattgaaggatgcctaggcagctggaaaagtcttgtttctgggtatgtctctgagggtattgccagaggagactgccatttgagtcagtggactgagagaggaagactcaccctcaacatgggtgggcactatccaatcggctgctagcacggctagaacaaagcaggtggaagaaggtgttataaccttgcttgcctgccgagtcttctgatttccttctttttcctaagccagatgcttccttccactctttctgcccttggacatcagaatccagattctttggcctttggactctaggacttgcatcagtggcttcctgggggctctcagaccttcagccacagactgaagcctgcactgtgagtttcccgggttttgaggcttttagacttgaactgagccactactggcttcccagcttgcagatggcctaacacgatgggactttgccttgtaattgtgcgagccaattctccccaataaacatcctttcatatatacatatatcctattagttctgtccctctggagaaccgtgactaatacagtaagcatggatcataaacggtgaatttggaagtactgagggagtcagatcatgaaagaccttggaagacctgctagcctatatacattttgattttaagcagggaattaacataattagtgggttataagggggataggagtacaagtgagacaaggagacaagctgggagactgttgtagtaatgcagatgagaaggagcagtaggaatagacagaagtgctggagtcaagccatagttaggagacagaatggagaggacctgatgtgggagggtgagtggaaagaggaatatcaggaatgatgcccagttttctgtttgtagtaactgaatgagtgttgatgcaattcactgtgacagaaaataaatgagtaggaataaatttagggggaaacaatgtttcattttagacagatcatattatagatctatgaggcatcctgcaggatctgggaacagattaccaagtcagatttttcaggcaagaccggccagtgggatctgcgccctgaagaagaactaagctgcctcttagatccccaatattccaaggaaaacctctgagcaaaaggtcccctttgctgccttgatcttatttgaggtctgagcttctttcctgcaaatctttggcttaagatgtagcaatgatatctaaagtgctgaagactccaatccagtctccaccctgggagtacgtggagacctcctcttcacttagatgtgtgaccaagcacagggattgctgctgattcagtctagtcactctaaaaagtatcactcgagagctgaatatttagcccttttgttagaagtgaatggttgcatcttgtgtgtgatgggtgcataatatttaccagtgtggtaaatatctggtattgtctgtgcactattttccaaccatttttcacataggtacgtttaaagattttttgccttcctaataatttttgttgtcattgctattttgccttcagaaaaaaaaatagaaaaagaaaaatgtgattaatatggccccattcaaatcatgaagcaggagctgccattgtgaaagctatatagatggactcaggcacctaatgccaatgtaaaccagggaggctacctgctatgcctaaaagagtactggaattggaagcagggcacctgccttcaagtcccaggttttcattcactagaaggtccctttggcaagtcacttatctcccttgggtcttactggccttatctgaaaaatgggcagatcattgtagtcactgctgcatcacagggccatttgcagattacaaaaagtccaagtaaagggctatagaaaccagaattacatcccatatgctccaatcttagactcccaggctttggttccagaccaaacatctttcatctactctttctcctaaagttaacattgccttcagctgctgtggctacattcttaattttttaagaaagatcattgttttctcttacagtgcatagtatgggactgggactccaatggcaagcatgacttcattggagaattcacctcgacattcaaggagatgagaggagcaatggaagggaaacaggtacatggtcaaccacttttggttttgcctccagtcggtatgatgcatccttagaacacagctaccaatgaaacagcaagaggcaaaacatcaatgtatgattaagtgtgataagaagggagcatggtaggatgtgagtatctagattctagaactagcccaacccaaagcaattgtgtgtgcttggacaagacactgaccccaaacgttacagtttctccattagtaaaacagaaaggttagatgagagtatttctaacttcctttacctgtgtagccctgaaaagtgacttaatctctccatgcctcattttgctcatctaaaaatataagagtgataattgtacctacctcatagaattttgtgaagattaaatgagacaatcctaggtgatagcagagcgcctagcacatagctagcatttccaaaatatctgctattaacagtagtattccttctaggtctatatttccatgatttggtgacattaataatactttcatgccttggagaaattatttgaatcctccaaattttcatataggtaccaggttttcttctagttccatcattttactcttacacatttgatgccaagacctgtacacaagcactaccacataccactaagacacactgtcccacacagaaacccaaaccccttctgtgtttccctcagatacacacactttcatatcatataatatctagacagacagacagacagacagacagacagacagacagacagacagatagagatagaaagtcatctgggcccaaatcatgcaacttctccttttacctgtttattgttcacctgcccaatttccagctgaaatacctctttgcctggcagatttctctatctgctggagcctgttttatccatgcccaaaagcaagatagaagtgtggaaggagatgtaacaggaggtagccctcaacaaataactaatggaagttgggatataaataccccagctcccttgcccttcagttggcaaaactctgaggtgtatgctctatacagtttcccagagttctccagcaggccctagttatccacagtggtaactgacttgataatgcaccctttctgggatgcctcttctatctaatttctcactcctctattcatgcttcctggtatcacctcccagatggcctacttgcacttatattcttgcctcaaatttgcttcttggggaactcaacccaagacacctgccgttcttactctggagttcactgtcctcatggagcagaaaggagtgaaagcagagggctcagtgcttttgagaaagtctttttctttagagataatactctgtgcctgttctgatcagaagtgctaattagagatgcctcaactcatttttcagctctctcatatgtaaggtcaggatacagtcagactggatggaaatgaactaacatttttttagagtcagaaacttaatctgaatgataccatttgttgaacacatacctttggtctggaaactcaatggaaacaatggcagctttccacttagttcctgcaaaacctgctgtaaatgctctgttaggtactcagcattacaagaaacttgtcaaacacccagagaccatcacccacaagccaggatgcagagtttcagagccacagttaaaaccaacactaaattataagcaaagtcattcccaagataacaaggaatatagctagagaatattgctctattgaatatgcagaactagtcctatttagctgctaaatcaatgatagcattcataccacctgctagagttctaaaaagttttataaagttttgccttatccacttctatgaatagaaatagtccaagcagtaaatatgggaaatatttcatcttattaattaaatattaaaagtaagaatgtaacacatatcataaatgaaatataccaaaacctaatgctttcaaacagagagaaatcgtttaagttccactgaggaaatggaccatatgctaatgtgcttttctgaatcactgagctaccagaaaaactttagtttaactacccagccactgttttggtgtagttatacagtgggaaatattgtcttatttattgtttctacaatatttatcgagtagcacctagtaaattccaagcactgtgacaggctctaaatgcaccatgactaacaatgctgacatggtccctgcccttctgaagcttacagattggtgggagtcaggatagaatgtaaacacaaatttaaaaagttaaaatgcaactacaatttgtgacaaatgctattacaaaactaaaccagtttcattataaaagtgtgcatatagaaaagataatctgacatttaagttgaggccccttaatgattaaaaagaagccaatatgtaatgagtgagagaaacgcatttgaagtaaaaggaatagtagtgcaaagtacagaggcagggctgagcttggtgtgattgaggacctggaaaaagaccagtgtatctgaagcagagagtgaaagaaccattcataggatgtggtcagatatagaggcagaggccaggaaaagcagattcttctaaatgtgataagagcatgtgcaagctgtgctttcctatacattagccactagctacatgtggctatttaaatttaaattaattaaaataaaattaaataacaagttaagttcctcagtcatgctagccacatttcaaatactcaatagtctcatgtggctggtggctactatatttgatagtgcagattcagaatattccaattattgagaaaattctactggacagtgctgcaaagtgttctagctagagaatgacatgattggttttaattttttaaaatattacttttgctactgtgtagataattaaagagagacaagggagatctgttaggaggctaccactatagataagaggtgataatgacttgggttaaggaactagtcatagagatagataaattggagagacttaagacatattttggagatatgagctacaaggtttgttgaaggcttggatatagggagtaagggaaggaggaaatggttgactcaaggatagattattaaattgtgccatttcctgaggtaaggaagaattgtggtagcgaggtccagtttatgaggaagttttcaaaatttggtttcaaaaactggtactcagaggagaggtttacccgtaaatatattttaggagccatcaactaagagaggacatttaaaatcaagagaatggatgagtacacctagggagaggggactgaagagaaggtacaggaggctcgaaccctgaggaatctcagtatgtagcatcagagaaaaaaagaggagagaacatctttcaactttccttttcctgtgggagttatgattctataggtacagggtaaattcttaattaaccttgattaattcttgaataacatttataagtatccttagtttggggtggccaaaggggatacttgcaagaataggagagctactccaagaccttctagaagaaggcattgtggttaatagtgcaggctttggaatgagactgatgtgggtgtgaatcccaggtctaccagttactacctgtatgacctgggaaagttctttctcttctctgagcctcatcttccatctgtcaaagtgggctgtggggagagttaaatgggattgggaaagtaaagtgcatagcccatagttatatgccaacttcatcccaagacagatgcaaactatttagatctggtccatcaggaccccctacccacctcacaagtacaaggaccccaagtatctacgggtttgattcaacttccttggagccctctcctgactaagccaacccatacttgctcatcttagcctgagaaggaagtgagtagacttttcatggatgatcactataatttttaatagaattcaaaatctttaactcaatatatcctgcttgatagaagaaattgagattaatagaaatcattgagaatgacaaaaaatggcacagctaattttagtgtcttttctttccaactgtttggtaaatccctaaaccacctgttttactgaaatattagaggaagctttggggcaaaagacaatatcagttttgataggtttgggaggaacttgggctcttttgtccagaaatactaaatctactttgagatggactataattcttgtttatcaagttctacccacttggagagtaaatgagaagaaaatctgagggaggaaagaaagacaacattcattatggacagattaggagattaggcctttaaatgacaaaaacaaggctaggggtctgattttagattctgctttgaatgttttcttctttctttctttcacccaagaattccatattttgaaggagtcatagaggactcttcactggtataagatctccctcttccaaatcctatgtagttgcccagtcctgctggcaccttccagtgatgagaaactacagtatcagttatctgttgctgagtgaaaaaattagcccagaacttcctggctgaaaacaacaatcactatgtactcaacattcgctaggttggcagtattggctgaattcttctctgcttcacatagtgctccacgtggtgccaacagaactcactcgtgcatttgtgcctcagcagccaggatggccaggatatttctccaggtatacttttatcctcctggagaccattgtaggctttttaatatggccctgaaaacttcccagaagcaagagaggagccagccccaatacacaggcgcttttcaagcctctgcttatatcacatttcctaatgtcccattggccaaaatgagtcatgtgactaaatgcctcatcattgtgggagggagctacacaaatgcatggacactgagaggaatagattatgggaggccactgctatatcagcctatccatttgcacctgcctcagaaactacttcattttcagacacttctaattctcaggtagtgaaattttgtctcttgagtagaaatccagagattcagctttcataggttggtgggcaggaacattcaacaactcttggatatttgattcacaattggttttgtcccattaaatcttctgtaggctggagacctattccccttagttcccagctgactccttaattcccagccactcctgtagctctgatcttatccttcaaaaaggcccctttggagatctactgtgtcacttttgggacataagccaatccattattttagttctccatgaagttctatgttaatttattattgtccctagtaaatttctctagccagcattcactattcctaaccttttgagtcaattctcaggcagtaagccttagtacttggtcatcactcaactgtgttcctgcagatttcttcttccctgtactgctttatttgaccatattaatagtaagcattgacatgtgccaggccctgttctaaatttattacaaggattaatcagtcttcacaataatcctatgagatagagtataattataagctccattttgcagagaagacattcaagacatagagcaatcaagtaacttgccaaaagtcacataagcagggaagcggagttgctggggttcaaacctagaagtctgacagtgagtatcactctcaaccactccccctattgctcctctagatgcaagagttaccacctagagactatttgtcagccctccagttcagtttgtcctcagcagcacctaggagcttggccttattgaaagactcagctttttcctgaacagattctcatgctatgacccttctttcaggtgcagtgggagtgcatcaatcccaagtacaaagccaagaagaagaattacaagaactcaggcactgtgattctgaatctgtgcaaggtatgtacacaaccctctcttccaggagtatgaagctagggctatctgagaggaagagttcaggtggtgtggtcagaggaaaagagtatcaaaaagatgtgatcttttaaaataaaaattaaaaagtcatgtattaaagaacataaaatgagaaatgtaagcatgggtggtcatggagctgtggcagcgcagtgtcactgtcctctccccagggacagtcctgccccaaagacaggagagttccgctgataggttaggatcatctctgcccagagcagtgctagagggagatctccaaatggggaagccaacatttctagaacacctactatgtgcccttcacggtgtccagtggttgttttgtttggtttggtttggttttggttttgtttgtttgctttgttttgggacagagttttgctctgtcacccaggctggagtgcagtggtgcgatatcggctcactgcaacctctgccacccaggttcaagtgattcttctgcctcagcctcccaactagctgggactacaggtgcccgccaccacgcccagctaattttttctatttttagtagagatggggtttcaccatgttagccaggatggtcttgatctcctgacctcatgatccgcctgcctcagcctcccaaagtgctgggattacaggcatgacccaccgtgcccagcctgtccagtgttttatatgtggtaccttattcatactgaaagcgtaccataaaaacaagacaacaggcaaagattaaagggcttacgaattccttccagaggggctacaactttgcagagaatcacatgtgctaataattaaacttcttaactcaaatctgggagtgatgctgacactagttgagtacttactatgcaaaaataactataataaactctgtttaattcttaccacaaccctgagatgtctactttcaattgaggttatgtacctagctcagagtcacacaagtagtaaatttaagagctgagattttaacccacgtgtctctgactcctccatacaggactcaattgctatccagatgattgttgtgtgtgcatgttgtgtgtgtgtgtgcgtgtgtgtgtgtatacaggcatacatatatgtgtatatgtatatgtatatgtatatgtatatgtatatgtatatgtatatgtatatgtatagaggccaatgtcagggatattttgggttctattccaaaccaatgcaataaagcaagtcatacacattctttcatttcccagtgcatataaaagttatgtttacactatactgtagtctattaagtatacaatagcattatgtctaaaaatgtacgtactttaatttaaaaataccttattgctaaaaaatgcaacagtcatatgagccttgagtaagtcataatctttttgctggtggaggaccttatctggatattgatggttgctgactgatcatggtggtaattgctgaaagttggggtggctgaggtaacttttaaaaataagacaacaatgaagtttctcattaattgactcctcctttaatgaaagatttctctgtagcatgtgatgctgtctgatagcattttgcccatggcagaacttctttcaaaaatggagttaatcctctcacaccctgcctctgctttatcaactaaatttagggaatattctaaattatttcttgtcatttcaacagtgttcacagcatcttcaccaggagcagattcaagaaaccactttctttgtttatccatgagaattaactcctcatccattcaagttttatcagttgtggcaattcagccacatcttcaggctccacttataattccggttcccttgctatttctaccacatctccagtttgtcccaccagtgaagttttgaactcctcaaggtcatcctagagggttaaaatctacttcttccaaactcctattagtgttgatatttcaacctcctcccatgactcatgaatgttcttaatggcatctagaatcatgaatcttttccagaaagttttcaatttacttttctgagatctatcagaaaaactaccgtaatgatagttataaccttatgaaatgtatttcttaaataagaagacttgaaagttgaaattacccctagattcatggggtgcagaataggatattgtgttagcagtcatgaaaacaacgataaaaccccttgcacatctccatcagagcttttgggtgactaggtctattgtcaatgaactgtaacattttgaaaggaatctttttttctgagtagactcaaaatattcagtaaatcatgctgtaaacagatgtgatgccatccaggctttgctcttccatttgtagagcatgggcagagtagatatagcataattgttaagagtgctagaatttttgaaatggtaaatgaacattggcttccacttaaagtcaccagctgcaatggcccctaataagaaagtaagcctgccctttgaagatttgaagccaggcagtgacttcttctctctagccaggaaagtcctgatggcatcttcttcttccttgttctacaatgaaaatccgttgtttagtgtagtaaccttcctcaaatgattttagctggatcttctggataaattgtggcagcttttccatcagcatttgctgctttaccttacacttttatgttacagagacagtttctttccttaaacctcatgaaccaacctcctctgctagcttcaaacttttcttctgcatcttcctcacctctctcagccttcatagaattgaagtgagttagggctttgctctagattaggttttagcttaagggaatgttgtatctggtttgatcttttatctaaaccactaaaacttccttcacataagcagtaagcctatttcacttccttatcatttgtatattcactgttttaatttcaagaacttttactttgcattcacaacttggctgtttggtgcaagaggcctaacttttggcctacctcagctactgacatgccttcctcactaagtttaatcatttctagcttttaattttaagtaagagatgcatgactcttcctttcacttgaacacttagaggccattgtagggttattaactggcctcatttcaatagagtagtgtctcaggggatagggagacccaaggagagggagagacatgaaggaatggccagttggtggagcagtgagaacacacacaacacttatcaattaagttcaccatcttatgtgggcttggttcatagcaccccaaaataattacaacagtaacatcaaagataactgatcacagatcaccataatagatacaataataatgaaaaagttggaaatattacaattaccaaaatgtgacagacacaaagcgagcacatactgttgggaaaatggcaccaatagtattgctcaatgcaatgttgtcagaaaccttcaatctgtaaaaaatataaagctcaataaagtgaggtacaataaaagaagatacacctatacatatatgtgtgtgtgtgtatacacacacccagatggtccccaatttacgatgactcaacttataattttttgaacttatgaagggcttattagcatgtaaccccactgtaagtccaggagcagttgtatatacatgtatttatgtatatatacagtcatgctctgcataataacattttgtcaatgatggaccaccgatatgacagtactcccataagattataatggaggtgaaaaattcctatcacctagtgactcatagccattgtaatgcaattactttattttttaaacaaattcagtgtagcttaagtgtttataaggtctacagcagtgtatagtaatagtctaggccttcacattcactcacctctcactcactgactcactcagagcaacttctagtcctgcaggctccattcatggtaacttctctatacaggtgtgccatttattatattttataccatatttttactgtgcctttttatgtttagatatgtttagatacacaaagacttacagttgtgttacagttgcttacaatattcagtacaataacatgatgtacaggcttgtggcctaggaacaataggctataccacatagcctaggtgtatagtgggatataccacctaggtttgtgtaagtatactctatgatgttcacgcaatgataaaatcacctaacagtgtatttctcagaatgtatttccatcattaaatgacacatgattgtatatatgtatacgtgtgtgtatgtgtgtgtttatgtgtgtgtatacatacatagatatatgtttcctaacatattagaaggaacctaatatgtatatatacaggaccatatccttacataacaagatagtgaaggaaaagagtaattggtctgctttgggtcatatccctaccctttacaccaattgctgggactaggggataatgtcttatgactggccattgtattaatctttttttttcaatattttttgatgctttgacaactttgggccttatgaacctaagagggactactctcccagtgttagctaattcctatagacagcaaacaacctgccttttagcatgcctttgatatacaaaccaatcattttttagttcaaacccccaatcacctcccttaccaaactctcacacaccaagccaatgttctcccaccttatatgcccctagggtcaggtctcacataactagaaaccactcacatggttttgatagatttcaaaacctgctgaaatcgttcaaactatccaatcctaggcctgcttagctgcttaccctgccttgcccactcctgcctatgaaaaaaaaacacacagtaaatggtttgcccatgctttcccttcattgcttttgcttcctgacctatcctggtgcttccccatgtgaccttcctttgtggcataacatgcctcctatcctttgaagaactgtgagcaataaactcttcttacagatacagacatctgtctccatgtcaggcatcttatcataactgtacaaatcaaatcctgggtacattctaaacagttatgtgactatccttgtgctcaaagaagcaggagaaaagatctagattcaatggttatctttctccttaaggtgactgtgtacacacaattttttttttcttccatgagttgctcttagagttcagtgctcagaagcactgttattttgctcactttcaagttcttatttctttgatatgcagacacagtagcacagtgtcccaactatcaggcaaagcattaccatcaggacaccaaaagtaagcactatttagaggccaagtgaacatcaattctaagaaaagtatgccaatagatgtgtgccacctggaggtggtatctagagagaccaacactgattttttgggtctctctaagaagcttcctgagcattagatggaatctgagaagtgacagtcaaaaattacagttactggctgtccaggtagaaggatccagactgtaagtactgtatgtgtttttctaatcactgtagtcctagaatctagtgcatagtgagtattcaataaataattgttgaataaacgaatacatgaatatcaccaagagccaagccaagcagcaaaatcacaaagaaatgtaaattaagaccagaaatccctaaggtacttgagaacacatgatggcagttggcataacgcaacaaccatactgacttccagagtagaggtcaaaaggacagagtatgtaacccagacttgcatcatttgagtctcaactctaccatttattagcattgtgatcttgaccttaatttcctcatctataaacagggtacaataataatagttgtgccaccttcataggattgttctgagaattaaatgaggtaaaagatgttaagtacctgtcattcagtaatgcccaataaatgttagtcattgttgttcatggcaggggaagcatttaactaactggaaattgtcagtaaattaccttctcagccaatggtattttaaaactgcctatctaaattacctgcatattaagaatgtcaccaggactgggacttagacacagggaggcaagactgaagtcaagtgtgagacatcattgatttcaaaacagtagtgacacttgaaaatatagttttagtctcacttcagaggcataagctgattaaaatttgcataaaccataatagaggggagcaatggatggatattggcagcattcataggcccatctgtattaatattgctttccttctctcctttaacagaacaaacttaactgacccatcttttttcaatgatgtctgtctgccctttcctctggtttagcagcttatcagtcaccaacctttaggcctccaatatatcaggaaatagactgtgctgttattaacccagtttcctctcccctcctatgcagattcacaagatgcattctttcttggactacatcatgggtggctgccaaatccagtttacagtaagttgttttcatgttgattccttgattcttattcaggaatcaagagatgaggggtggcactgggtttgggggataaagagacaaaagcttattaaaaccttcaggcagctttgttcaagtctcattgttgaagcgtatggtatcgtgtttttgaaatgtgttcacacttctgttttctttaataagtatagttttcagcatcatatcaggaaatttatgccactcaacctcaggtggtctaggaaatcctcctaacgcttcccatttcttcagtaactatgtgaggcatgaagcagagtagcctgtcagattccatcacctggtgagaaaaattgaaaggaagtaagccaagcaagtaagttccactgagccaaggcagatgccatggttgtgttcatgtgactagaccacagcaccaatgtcatacccagtagtcgggaccaagagtaagccatacaaacagttcattaggcaatgaaaagatgaattccaaagattggagaaccaggccgaggtcaaggttgagaagtagagtgggtgtctagactcagtgaatggatcaaggatcatcccctgtatgtaatttgtgtgcccttgggatttacacacccctgatgtatatttgactgggtaggctgagtctttttaaagtgcctaggtaggtcaaggttgtaagtccatctgcactggaacaactgactttcactgacttaatattcaaaattctcctaggtttggtcagatgtgacttccagaaaaagaatccccagatggcaaaagacagatgtgctagaaccctttggaaagcaatgtggacgtaaacaagagagatgtaacttgtacagcatttatttctcatcttacagaaatgtactaacgaagctcagccctgttcagctccctgactggctcagtcatttgaaaaaaggaaataaaatgggtttaaatttttagtcaagctttgggcccaagagagtagacgggacctatatattcctggaaccaaggaagatggtgctcaaaggactaaaaggagtctcaaaggatgagataaatggtcatttactaaactagcttctccttagctagggaagtatcctctgccctaatctcagggaggtatacctatgtccttcctaaacttggggtattgtgcatttatttctgaacgcttacaggagcaaattttagagtttggtctcctctttaaagtctaagattctctaatgcacagccagcaagccttcctacattcacactgtcacatacagaaggtagcaagcatgttcgctgaggatacacatctaactctagctgtcctgtgggctcattgctgctctgagcatacccatatggaagtatggaagcaagcaatgtcataaaggagagctactggaaatagtttcccaagatcttaggcaaaaacgtgatttcaggaaactatttatagcttttcaagggaaagctctattgatttcagtctggtttagattttgtagatcccatgctcttgaacaactctgtattcaaccttcaggggcttgctctgcccttcaaattgtgctgcaaagaatcagccccaacaaaaattaggtgctgaaccccaacctaaagtgttcccagctccacatcctgactttcagatatccctgtgccctgcattgttctcccctcctttctcagtctgctgaccttcccccactgagagtaccacttcagtgtttgtcaccaacaacaccccagttgcagctccccatgccctccagtgtcaactgatagacctgtgggaggtgtgagtgaggagagcagtctggagcaaggaatgagaagaggagaatgtacagatgaatgctgaggagaagggggcagccaacaatagttcctccccacagcccttcctcctgtagggtttcaggttggggactcagaagagaattgctaggtattctattcccagtgttctactaaaggaaacataccagtcacttctatgtcattttcttccaaaatgaagtcagctttctcattctaaatgttttattgctcaagtggtgcaacttaatttaaattataagctgtaatgcaaatcgttaagaaaaagtatcgtgtcttatttaatttggtctgtaagtgtttattatctgcctggttattttactgaaaccatctggcaacatgaaaaggaagtggcagagagatgagaagtgaagagaggaaggtttcctggcatggaggtgggcagaggagagagagaaaagggatgtttcattgcagtaattatacctcagaggctttcagaggcaaaaacccccattggcacattatgtgacccttggctcctgagcaaccagggagctttagccaacacaaactttttgtctccctggagaaaggccttcaagcaccagaggtgacataaagttctggatgttctccatttcctcccctagagccactttccatccttctccactctcccttctgtgccccaggaagcaagcctccttggatgcaccacccaagctctccagctcttagcttttggttggatttgaccaacgagaggcagccatcagagatcaaagaataggaggcgagagaacttgaaatatttatttctctagctgcctgcctgctaggctgtggttgggcagcgaccttcttcctgacagaaggtcacagttcctgtcaggtgccctgtcctgaagatactcctcttactgaattctagtaactgctccctcccactctttctggtcagtttccattaaccttttccacatgtttgtgaattgtccctttattaaacttcctcaatcaccttttgagtggactttttgtttcctgtagtggctctgaccaatacaaaatataagcaggggctaggagaaagcctttgtatcttccatagatgctggtgcttctggttcaatcttaagagtgttaaagatgggggcatctttctcctcagctgctaagctgctcaaaatacttttgctgaattgtaataattgaaccctaaaccttcaaagggaggttagatttagaaaaaagaacaaattggataaataaacatgatattggggttttgctttaaaaagcatcccccataaacttaagtatttatgtaccactatattctaattataaatactaaaaccttaattaggaaaatgaataaacaggatgtatttaggggagtattggggaagcagtttggggtcagaacttgaagggctttgaattttgaggtaatttggtggataatgcatgttccaaaggatattgacgagggccttgaagcaacaggcacatgctttcgacaagtaaacctgggtgtttgatggtggtgatgggggaacgagagatgaagcaagcagagatggaagcccactgccacaggcctggtaccaggtaaaaagaagctaaacaagggtggcagcagcaggagaggtactgtggaaagagaagcactaagcctctgcctagaatacaatgagaagactgaaagcaatcaaagcttttgtgcctgactgacagagcatagtggacctggtcagggaaatacgcgaggcaacagcagctgtaggcaagatgatgaatttggctttggacacgtcagaggtactttcaggtatcccagtggagatggtacttataaatatggacctaggtttcaggggagagtcaggagctacatgtatgtggctttggatgagatgtcccaagagaaaaatatagaaggaaaaggggcctgatgacaaggaattgtagaggacctctatctggcagcagaggaaagaggggcaaagagttaagagaagaaatgccagaggagaagaaggcccaaggggaggcagtaactcagatgcccaggaggaaaaagctaaggttaagatcaagggcaacaatcttgcatgctaaagagaagtcagagggtgaagaacaacatgatgagtaggtaggtgtatatcatcttcaaaagagcaacttcagcataacgagataggtgagacccaggagttagagtgtaaacagaaggtaaagaagtgaacacagcaggtgtaagtattcattcaagaagttaacagtgaagggaaggcaagaggtacaaggaggatggcaatttaaagattaaaagagaagagattttaagctagaatcagactataagcagaggtaacagcccagtggaaggaaagagataaatgatgctaaaaagagccctagacagtcaatgattcttattcttttttggtcacctgaacacttgagaatttgatacatgatctatagcctcttactgggaagtgcacacatccagttttgcatgcaattttgggaggtcaagggcactcctgaagacagtccttgtacctcacatgaatccttaagtcataagaactctagagcaactagtattgcagtctttgaggaggtgggtggaggtgaaacagaccacagggtgagagattgggtttggcacatggtagagcagctaaaaataaaaccagatactagaatttcacacacaaaatacaaagttatagataacacaaaatagacagatgccgtacagtatttgaaaagaaaaaatgggggagatatacctaatgctagatgacacgttagtgggtgcagcgcaccagcatggcacatgtatacatatgtaactaacctgcacaatgtgcacatgtaccctaaaacttagagtataataaaaaattttaaaaaaataaataaataaataaataaataaaaagaaaaaatggtagaaaaatcaaaggtttttttgaaggttattgctttttcatatgctcaaaaatgttcattgtaacacagatttttacacaggcactctgtcagcaacctaaatgtctaacaataaggtaatggctacatgaattacagtattcctttaaatactatgatatttattatcatagtatttagttatttagtattgactatgataaagcctatttaaattataattctaaggtttagataataacatgaggtcatgtttatgacatagtgttacaaaaacgtaaagcagagttactctatgattacaactatatatatataaaatacctagagaggaaagaaaaataaaatatgacttaccagcctagtggcatggcgagtgatatttttttcttattaattttaaacggacatttcttttgtgtcatttttaaaaattgaagataatattgctttctcttacctctgactatagtttatattttagtaatataataagctgctgaatgcaacttctcccagactgaccttcaaacctaaaaatttagatcactcattaaaggttctctcaggaaatctttttctttctttctttctctctttctttctttcttcctttcttctttttttttttgtttttttttgttttttttgttttttgaaacagggtctcactctgtttcccggagtgcagtgcagtagcacactggaagctcactgtaaccttaaactcctgagctcaagtgatgctcttgcctcagcctcctgagtagctgggactacaaccatatgctaccacactggctactttttaaaacaaatttttgtagagacagggtccagctgtgttgcccaagctggtctcaaactcctggcctcaagttatactttcatctcagcctcccaaagcactgggattataagtgtgagccaccgcacccagtctcaggaaatcttttctaaccctaaaacatttagggcatcctatgtccacactgtggcccagtttacatttttaaatctttattttacatcccagattgaacactgatctactctggtgtagaccttcgagtctgcttactgcttagtgagccctgcttactgaattcctatgcaaagccagggtacaatgggttaaagaggcaaatgctttgccatttccagaaaatgaaccaagtaagtttaggtgactttccctactttcctatttaactgccctcttagaaagttttctgaaaatagaaaagaataaaaatgtaacattatttaagaaatggtccagaccaaacagtatgttcacctacaaggttcattgtataggtccaaattgtacacagctatttaaaaagaaaagaaagaaagctccccaagaatgtggtcccaaaggtagactgcaggtacaactaaccagaggttgttacacagcagcttcccttagaaaacgtcgagaaggttcacaaatgacctgtttggcagatgaagggaagggatctgaggagtggggttgtttcatgtaagaatctaaaaatgcccaaagaaagatgctcatcatttgcaaccagccttttcccaggaacagctccacacactggggacttggtgtcatggagggggcattttgcattcttactttacaaggtttgcaaagctgctccacagctctgcttaataatgagcagtggcttcctgggcagaaggaaaaagcactgggcacctgttcttgtgctgcctgcagagaagattggagcacataccagaaccacaggtttccataaatgcttcctatcaggaaatgaaaacgtggtggctctgcgagctcaccggtattcagaaaaccaggcatcagtagccacctccacacactgacatttttcagtcattttcttgcttttatttctcaacttaatcccatctttcactgcctccctgttgctttctaaaataaacctaacctttcactctgctctctttctactaatgctaactttaaagagcacagagaattcttggtggaagaccaccccctgaagatagatattttatctccagcttcataaatgaggttttaggaaccactactttccagaaaataaaaatgaaaatattttagctgactcttacttaagactgtccattgctgtctagtcacatgataaaatttttttattaaaccatgagaactataaaatgggctatatggtaagaatcataagcctatttcctttttcatcagttaatttttaagttcataccctcccctaggtcgatatgagaatctcctgagatgaagtggcctctctcgttgtcatagacgtaggggccattgccatgggaaaagtggaaaccctagaggcctgactgaaaagaaataatagtaaaatttccaccaggcatgtttgaatgtttaaatagtagcaccaagaacaggcagcccaatactaaccttctagcattagcctgtaccttgtttcattatcttcaaaatatattattctcttctgtcccctcaaaacctggccattccctttccctaactgacatccaactctgcattcaagtggtcacaaaatcctattcattttctatccttactttcttcaatcactctttccttctcaccatcatctttgccccaccctagttaagcataagaaaattattccaagcctgacaatgaagagttgataggaatgaaaatgacatagtagggtcagtattggaggtaaagcaagagacgtacctggggtgcaaaatttaaggagactctcactctgcggattttgcaagtatagggtctgctgagagtgagtgcctccttgggttttacaaactaggcacttctttttgcctcaccccatctccagctctgatatgtttttttctattattttaaaatatattgttgccacaatctatgtatgcttgtccagacattacacacacttatctagatataacatattcatccaggtgatatactctggctcagatgctgccactaggtgcctgcatgctaggagaattttgccaatgcctaggaatgtttcttgagcagccatttttctttatggatttttttcctctggcctatataacccgattgcattgtctagttttatatcaagacaccagcatgtttttgtcatcacagaacacccttaacacttcaggagtttcagtcagacaaccagcacatgggacagattgttagctttagtatcaagaggcagaagcatgatgccttcagaggtaaggaggtggtgacccatgatggaaggcatcatgaatagaagtgaggtgggccacaaggtgtttgttattaataataaagtagcaacacctgccaatgattcactttttagataaattaaagcagaatcaaggtaatctccataacaacatcttcacgctctctagaattccctggagtactaacatgctttcctcagtggaagagaaaggggtggctttacatctggccttcccagcattacttttaccttttaaacactatgtacacctgtgcaaggtgccattatcccttaaacatgtcccattaggagtaaaaggctgagaatggtgtctgtgagttgagcttggtaaacccaggagggccccaaagatatgattttctcaaacattgtctctcaaacatctctggagtgctcctctcagaaattttcctggaattatctgcatgagtttggatctctatcttgttgaggcctcattggtggatcctgaggtgctcttcacctccttcttgttcagaaaatgcatgtaggttcctctctcccaccagcttttcatcgtagtccttgattaaaagggcctcacctatggtcttacttttttttttttttcctggtgggttggctctcaccttcaggataaacctgtcccagaagacactggactttattggtctccctaggttacctccactcatcctcagtaacaatcatctcactattgtgtgtgcaaacatacatacacacacatttcagttttccttttcttaagttttacacccattttggtcacgaagagtttattccaggcaattcttccccaaattgccatggttgcctcctagcaagtctccctacctccaggccaaatctcctgcattttttattggaataattatacccatgagaagtcctggtgttttggtcatagacatacatgttctcctggatgtatgatggcgtaatggaaaaaggtagaaaggaaccatatagacttggatttaaacccaactccaagccctgttaccctatgtcacatgaaaatggagtaatatcatgcatataaatgaagtaatatcatgccctctgtgtcacacacagttagcacagtgcctgacacagagattatttctctcttctttcctttgttatccaaagtaagggaatctaaggttcagggaagaactgcaatttttcttcagataacctttttttttttttttttacatactcttagtactagcatttatcagtaggcatcccctgattttaagaaatctgggtattctgaaaacagagtttgaatcctaagtttatttttgacgtagttctttggagaggcaaggaagaaaaagaaaaacataacacagatgaacacgtaatttcatgaaagaaaagaaaaaagcctataaatgaattaatgttagcctattgcttttctttcctagtcactttgatttgattgcagggtacaatatcagatgtgactaacatttttttccccatcaacttataccttaagaaacacaaacacacacgtggcatgtgttctctaccctttcagaaataatgttgcaccttcctagaaccaatggtgcattccagttatttgttgtaatgaaatttaccaaatataacacaaataacatttcccattatgattcccaagatcatatgaaaaaatagagcctttcgggcatagtaagccaatgaatgtattctactctaccccagaaggaaatggaattatgcaacataaacatttctttcttcccgtatgacttttattttaaccttcttccctcgaagcttaagtggcatttttaaagagatttttgctgggttaacttttatttagatggtggtgatgttggaaattagaagaagtgtttcttctcattttaacaccctcggcttaagcattttttgttctttcttttgttattaagaagtgttcagtgactcaacgtttacttacatgattatgatactgggggtcagaagaaatttgagaagttgaagcataaatgactagttggtggcaagacaggtttcccttctccacttcccactcacaatgcgataacattcaggcatcccctttgttgtaggcaggagttcttacatgaacgagaaccaaaatattgaatgccttacatggagctgctccttccagaaaatttgttataaccactctaacacatctctctgcatctggccactcatggaaacatgacaatggctttggtatgaagactgtatctttaacacagaatttggttttaagggatcttacctatgccgcgtagatggaattgttctgcccagggagtgtagaagtcttttcttagtgaactgtgaaattggagggcagatattctatccttactcttgctgcctggtgagatggatcaacagcatctgggctttctgatctatgtcaatctcaagttcctattaaacagagagaagagagtgcactggtgggaagggagactgaagactgcagaaatggcctcaaccaaattaataactagtttttcaagcaaattagtttattctctttctttattggcagggtatgtaatgtgctactgtttttgacccgaggccaggtctctctcatgactgatcacaattcttaggagatgcatccactttaaatttaccttttcttgtatttttctcttttaggtagctatagatttcactgcctcaaacggggaccccaggaacagctgttccttgcactacatccacccttaccaacccaatgagtatctgaaagctttggtagctgtgggggagatttgccaagactatgacaggtaagaggcttcaggacatttggagccttatcatctctcatgtgggttcagacggtctttggctgatcctgggcagaaagtggaaattaagtctagtagctccttatgtagtgacttcaaaagtttcattccctctgtactagaaaaactaagtttgtaccttgctcacgctggtcaccaaacaaatcctttctcagccttcttctctcaattgacttgcaagacgattggatagcaattttggtttccattttgtgaagtcttagcctgtgccttgctactcaaaattgcttatgcactagcagcattcttaacctactgaatttgaatctgcatttaacaagatccccagatgatttgtgtatactttagagtcgtagaagcacaggtctattagacattattacatctgatcctcacattaacccttatatagtatgtattccttaaaagaagggaatactgtacaggaggttaagtaatttgtacactatcacgtagccagaggcaggacttgagcccaggtctacccactccacagcttagcctgtaatcactatgcttcactgacctcaaaagctattggtaacttcagcagagggtgtggcacatgtatgtagccaggtgcatgtgtatgtttgcatgtatgtatatagaaaacatgattttaagatcaaatcaatgttctatttattcttacttgatgataaatattggcctttcctaccaagaaaattccctgtaaggagtatcttgcataaattacgttaaactgaatgtattctgcctttccagtagttttagaatgaagtaaaggaatttaggtgcatgcataaggaaagctttttgaaatgaaaccaatgtaaatataaatatgtgtaaatctcagttaactccctggtgtgattgtaaaccaaggctagttagtaatgagcagcaacaaattgacctttcaaaccaggaaaataaagaaagtaactccatcctttaggtttcagaggaattttgtaagacagcatgatttctgttctttctagtgtcataattggtgataatcatactaaaaacctgttatcctccacaccatgggaactgacacattttaaggactagaatgtacagggaaactaataggacagggcaatgggaaaggtgcagtcaatctcctgcctgcctgtgtctctggattcagcttggtcatcaccagtaactcaaatgtagtacaaagccagttggggaatgaatgagcaggtccagtaaaatcaaagagctttaaacactcaggcccttgctgataattcctctcctgtacatccaggaaaaaagtcaatagttattttaaattatctttttggaaaaacacctcttatacttaatcttgaggtattgactatgaagataacttgaatttcaacactgatttcttcaagccccaatgcaggcagtgggtgagggggttcctagagaggtttatatcatatgaagatttccaccagggagagaaaagactggccaattgcatccactacattggaaacttctccaaacgtccccaagacacaaaaacaagaattttcttccttctttataccacacacacagatgcatacacacattagtaatctagtaaaataatgtgtgcacatattgagagacaagaagggggagagtatcttcaggattctcaagttttcaatcttgaaatgcttgcaaaagataaagtaggtaaatgcacttaacacaaatgtcaaacagtagatgcttaattaaaaagttaactctgaatctgcggggaagaaagcagtctcataataaattacaaacagaagactgatgggttttctagaaatgaagatagtaagcctcagagccctcattatagttctgcagcagatttagtggatgatctggaagaagctgctgaacgtctccatttcctgatcgcctcacatgcaaaatgcagagactatagtcagagtggcatgtatatcttgtaaagcttttatccctttgtgagccagacaaagtctggggagcattttttgttccctcaaaaatgcagattcaatataaaaataagatataagatatgaaaccttaagagttacatgaagaatcatcataagtgattgttttaaaatttttaatagagtaagattgaccccaactgaccaagaaaatcaaatttctacagctcagtggagcaattcttttttccatataaagaaagcagctcaacattaaaatgggcaaatacttaaggaagaagaaggaggattgaaaaactccaatgctccttttaaaaagctccctagaagaatgtgtattgcaagctgctcacttgaaaactgacaaggttccgctgtttctcttttgtgtgggtggatagacaatagacaggcagagtcaggaaatttcaagtcggggctctggaattaatttattctcacatcaaagtcagtgtggttggggctcaaaatgaaacacttgaataaaaactgacagaaggcattgttccccctcctgcagtgacacagaggtttctaatccccatgagccttagaaattcctcccagcctctggcagccaagagttttctttttgccttgtacagtcattgctaccaggtcattatgaggtgatccatgaggtagaacagcttgagagatgcataaaactcttttcaggatggccttgaaggaaagcttcccacagacagcttgtcctcaagcctgcctgcctgttctgtccttcagcctctgaaagagatggtgctgctcatttcctctgcctttgaccacccaccccagcacaactacttgtacacacacacaaaaacacacacgcatgtatgtgcgcacacacacacacacacacaggcccacacaagctcaagttgtagcacttctccagctcctgtatcctggtctccctagtctgctcaaagccaaggtgacatcttttccttggggccagtagggatatgggtctctgaaaacctgaaatgttctctaataaaaagcatggtctgtctgctatcaagacagtacagaaactgaatgtgtacatttcctggaaatatggattgccattttatggaagtgtctatcacagaatgagacagatatcagaaaccaaggcagcatttctccatgatgtactagttatggtatgagaagacaaagttagaactgaaacccaatctgacaggtattttcaagtgtagagcagttgcttagtgatgagaagacagttcaaatcacgtgctaccttgtccactctacaccagtcagtggtcctcagccttggctgtacattgaagccattcgaaaagccttaaaatgtgacgatacctgcaccccaccccagaatctctgatttaactctctggtgtgcatcctggaaattagaattctttatcctgctaggtatccagggttgagacccagtgttaaatcatgagagatggctcagatgcaatggctaaggtcctatgcagcatctatttaagccccaaacacctcacgggaagctgtaaagacagaaaaattaatgaagcacaatttttccccaagtagcccacaatctcactgggcagaaacacgtgtaaataaattacagcccagcatggccggggaagtgttgccctgtgtcgggatgggaactgtataaaagagggaagggctaactctgtcctttgtgggaagaggggtggtcaaggagggagtcctggggatgataatttctgggctgatcagaatttggccttcagctttgttgttattagaatgtggatggatttgttctcctttttctgaatcattagaccagacaagccttctatgaggacagaatcaacagggatgatagagagagcatggggaactggtgacagttagacccgggctcaaaccccagctctgctacctctgttgtcataagatttgcattctatgggccttggttttcttcattgtaaattgaagatgtatcgcttcccttgcagagcagttataaggattagatataaagcagctggctaacacaggttctacctttataaatactcaataaatgtcagaggtgattatctttaataccctagatttatgtttcaaaaatgatctgaacacaaagggagacagaactattgtgtcagttctaaagttcactttggaccaatgatctttaaaatgtttttgctcatgtacttttaaaaaaaatattaaaatgtatagctgtcacattttttcactgaaatctgacatttttcatcatgagtttatatagtgataaagaatgaaaattctaatgtgttgtaagtttggacattttataataaaactcttacataactcttgtgactgagtcaagtggaatctaaatgccgtaactatttgatatccaccatcatccattttgtaaaaaatgagcaagctcttcaatgtgagttgagaattgtaattgtttcttccttttcatcgacttatatttccattctcttccctccaaaattttatcctaatgtatcttaataaaattggtttgaaattctgttataatcactgtatatttctgtaataaaattataaatttaaaactttttagtttctaaaaatttctaagatgaaaagattcaaagtattttttaaaatctgagcttttattacaattattactagtgcataattgatcaaaagaacataaatgtactagaaatttcagtgtaatttttgcctataaaaacctatcagaaatcagctcttactgaaacagataatggggtgtttttccaatttgtttatagacctgtggatgagtgctacctattactagaatgggagagtcaagcatcaattctaactcagttttttgctcttatcatcaatgtaaatactaagaaaacctgttcttataaataagtgtatggaaataaataacttgtctagcagtattactcaattctttcaagtttaagttatataccaaaaaaaattacataatggccaatcatcaaaacgttttcttcaatgaactaccagctgacatcagcacctgccaaaatttatttaaagcaaaacttggcaactacctgacttgcaaaaggattttttcccctagtgaatcattcatgtttagaattattcttcttgtatatgatgctacagagttttcacactctggagcaatggactatgatggttaagattcagaataggtaaaagagaaggatacgtgaaagggaaggtatgaatggagaacaggtctctccatcacaggcattcccagaatatcaatttcagcaaaaaacacatatggatgtagaggaactgaatactgatttccctttaaaaaaaaaagccatgtcctcatatccccagaaatgctttgcatttccaggtaccccagttttaagacctctgcttcagagaacagtttttattaaatgtctaggtgccctgagatgccatattgctgtgagcttcatttccttatggatacagtaatttttctttacgtttattaatgttttgatttatctcaaaatcttcaacagaaaggagaaaatggtgattaaaaataaatcttccatctggaggtcatttgacaatagtcattccctaagaaggtcaggacagcttactcattaccattgaagcacgtagggtttttttttattgtattttatactattttattctggttataagaaagattgcctttacccatgtggtaatatacccctcaattttccagattgtctgtctttgtcagtcattttcccagcagttgctaaatggccctttgctgggtgctgagtggatccaatcttgaattcttaaagcgttagtatacagatgctttcttttgtgttcaacttgctttcttttacttcttgcataataagactcttctctgcctagttttattttaaaacagaaataatggatgtttaaatccattgtgcttaggcttaaaactttttctttagtgtgtttattagttagaggctttctggtggctaagttcagagaatttatccctcctggctcattaattattccccttgtaggtgaggcattttccctaccttcctactcttgaaactcgattacatagcagtgcatcatgctcagcaaacattgaatccccaaaagtggcttagaaagtataaaaggaatatcattaacgctagaacaccatagggattagaaatggatggaatgttagagcttacccctcctcaactcatcaaaaaaagaaaataagggtgtggagactcccagtttctctattttgacttctgggtcatcctcgagtgtgaaggaccaggatccatcctccacccagaaaagccttacttcaggcttaactagaaagtaccctaaaatcccccgcacagatctcttctcacacctacccatgcttgttttgtttaaggaggaattgctgaggcaaagtatttcagtatgtccaaggacccagaagtatattttctcctatctatagctaatccttcataagctgttgtgagtctctatttacccacattaataccttatctaatacctgctagatgcaatgcaccacaaagcctggattgacccaacagtgaggagaagtgggagttggtgattttctggagaatttagacttcgatttcaaagaattccagcttccttgtatctcccagcccctaaccccaaatttgatacaattggctatgttttggtaaagttttgtcaaaaccatcattggctagtaatgagctcttaatcagtcaggtggtgataaaggagaatctagctttgctactttgacttttctgtcagcctggggattagtggggctcatccctttttccttatagatgtttaggacagtgagccctaacctgaattgactgaatataccaagaacagtgaaatgtaggaattgttccaaagaacaaatctcagttaatttcttaatgggagaagaaataaaaggtagatgacatgagaaggacacgtccttgccaagagccctatggcgacagccacccgacagcacaactattcgattaaagagggtcttatttgttgtctaggcagggggccagattactggaagtactagcagaaaatcacatttaatactacatataatcattaaattataatggtataacagaaaggtatgggctttggaatcacacaattctccttggtaatcaccataggccacttagcctttctgaggctctatttacctgtaaaatggaaataataagtaggtgaagcttccaggattgtgtgagaatttaataaatagatacatcatctagcagggggctggtacattgtatgcatcaataaatgttaattattctcttccccatcctgtcaactatagtacagtaaagttagagttaagatccaatatatgtgaatgcataattaagagagaaactccagtgtgcataagataactcaaaccaaaggatatgtaagtgattctctcaggttttcacaagaatcctcccttcttttcatagccacattttaataattaaaattcatggattatgtactcattaactactgagcacacattccatgacaagttctataataaatggtggggcagggggcagttgaggcagaagacagtagagatataaagattttaataccaaagacagggtctctttgagttcaaaaaacaagaaaagacatgtaaacaacttatcaccgcttgtatgtgataaggtggtgggcacaatgagtcatgtagagggaaccaagctctgtcaaattagccaaacttacaagctttccactgcttgttttttgcttttgagatagagtcttggtctattacccaggctggagtgcaatggtgcattcttagctcactgcagcctccacctccagggttcaagcaattctcttatgcctcagcctcctgagtagctgggattacaggagtgcaccaccatgcccagctaatttttgtatttttagtagagatggggtttctccatgttggccagactggtcttgaactcctggcctcaagtgatctacccacctcggcctcccaaagttctgggattacaggagtgagccactgcacctggccccattgctttttaatatccatttcgattcagtcttatctgtatttgaactctagctctaattagtggcatgatcttgggcaagtcactttacctctcaaggcatttccccacctgcagaaggggaataactatctctccttgtattttaaaagatgatacatacaaaaggttctaacacagtcaaccattacagttacctagttcatggtcacttttcaaaggaaacaaagttgaaagttgaagtggaggccattgatgaaagggtagggccattttatttcttagtatagaatctagcaaaaaaattaagggaggaagttgtagactaatgactgtaatgaacttaaggggctgtttcttgattttaattatccatgctattgctacccccatcaccacagacaatcaagaagcatgagtcagcactggcatagcaacatggcctagcaacctagtaatgtaggttaatgtttttctttctcattaaatgaataaatgaagcaacttcttgttttttcttttcttcattttggtttcagtgacaaaatgttccctgcctttgggtttggcgccaggatacctccagagtacacggtgagtgagtggagatgtgatcttcttccacttcactgtggtcaaaggataacttggctcttctttgcagcagtctcacactcctgactctgacctaactgtgtcagtagggcctacagagtcagaaattgtcttcagaatcagtgagattaactcgccagggcccgtctcttgatgaaaccctatctcctggtattttggatgggtcttctcagaggtccagatgaagagtttcattgtttagtttcttataaatgtggtcagagtctgagaaaacactcaagaagttgatctccaggggctcagaacctattcactcgtatatcccctaggaaatagaattctattggcaatgccaactgggaaagtccgtgacaatggagtctacagactttcttatcccaagtctccgagtccaagtcttgtatgggagacacagagaagttttgaagaaagaactattatgacttagagaattgggaagctgaaatgttcttctgaagacgttggaatcctatttggttttgataatgatttctcatgacagaaaaaaggcaaagattgtgtgtagataaatttgcactgtaatgaggctgagacactactgtgatattctagatgctcctgtagaacattctccacagagaactcgtgcccactaggtggacagggccttggagagacagcagggtacctctcccagcctccaccttaccagtgcctctgaggtctgagctaagtacaaacaacactgcccaatcctcaatttctcttttactggctgtgtctgagccacaggtgaggaggtagatgctgacatttgctccctcactagagccatcatataaagggctttccccttaggtatcctttttgaaagaggaaatcaatatccctgttgctcctagagtgaatagtggatggaatcgcttgtctccctgacctgttctccttctttcttgccttgtattccacactggcctttctgctgggcatagctacataattctagaagcatttattagaaatacagcttgtggagagaaagaatatagaacaagagttatcaactggtggcctatagacattattcaggccacaaatatgttatatttgacacacttttaaaaaacgaattcagcaattgcatatataaaatgtcagatttctggtttctcttgaaaacctgaaaggcctggcaacactaagattaaaagatgaccgatacaagaataagctggagctgaggagatataggccccttcaaatcgggaatgtaaacaggtgaatgcccactttcttcatagagctgctgaatagctcaatagccatcagcccaactacccagggattcttgagttttcaccacatccccaccaggtggtcttccagcctcaggttggcccaacagggctgaggacagagctatgcaccatacctttttctcactaatgacatctttttggttcccttcctggagtaactaatctttcttgctgttttctgaagtcctcttgttcacttgatcccctaactccatccttcctgtcagcaaaatcccctggttattcttgtttcaataggcatctctcacatttccccatttctggtcccctaatttctcccattcctcagacaagcactgatgatttgagcagctcaggtgcccccaggagagtttacaaggttgccacaatttacttcttaggacaaaatctgaaagtatgcattgaaactgaaacacaagcacctctctttcttagttagcactttctcagaaacagatcttgagacaagggtttggatgcaaatagtttatttaaaaggtgagggaaaccacaatagaggttgggaagtggaagtcagcacagagtatattatcaagtcagttaccgctgttggcaactggtgcttaactctgctgaagaaccctaggagacaatatacagcacacatggaccccaagggataagggagctgggatatgtatacatcacctcctgttaattactgattactcccaagggtcacttttagcctgtcacttgggcaagcaaggcaggccctggaggccaagaaaaaacttaaggtaaacaaagcaaataagatgactgaagtcagctggcttacctggaagtgctaagagcaagggactaggataagcactgagagcatcaccgatcacctcccactaagaaaacaggtgtcttttaacacagtgacctaatttatggatacccaaaagagtcagagcttggaaatatcctttgaaatgaaattctccataaaataccaaatgattcaataaaaatgtccagatgccagaacatctatcttgttttatcaggttttcggaaagaaaaaagtaaacaatatgttatttgaccttgtgcataggttctgccaggtagaggaatttgtgttgaaatattacaaagtatattactttactatgtttccaaaagtagagtgcagtctgttttacctgtaggtatgtgaaaatcctcctgccctgtagttctgcatatcatgttaatgattcttaagtgtcaactgcttagctgaagcttttataaccatcgctatcttcagcagacagcttgggttattgagtttttttgtttttatttttgttttaatcactgggtccaaatagagctcagccaaatctaagcctccagtctgtggccagttctaactagcagctattcaaagtgatctttctgaaatcttttcttggatttttttataagccttattctcccctcctgacagcatttatctgattctagaaaatattcctgtcacctcaactccacagggagcttagaattcaccctccatctcatattgattgtgtaaaggcttgaaatggttcctgctgcttaacacataatgaatataatgggcatttgtttgcaaactctaaaccccagtgccttcttactggattaaagttgtaattcttctttcttcctgttttttaaattttaatcggtgtctaggtctctcatgactttgcaatcaactttaatgaagacaacccagaatgtgcaggtaaagcacaacgtgaaagaaagccagtgtcacagtccttccctttgcagctttcccattttagttcatctctgctggtgtagcatattagttacgattgtccacagaatctctgctttctgtatcaacataaaccatgctactccacaggcaagagaaagccatgataacagagcaggaaaataagaactggaaaagacagaatgcagaagaggtggtcttgagtgtatggcaataatgttgatcccagtctgggattccttgggccataataataataataataataaatgaaacttcacctggtaggcagtgatacaatatccctctttctgttttccaaattttcatcaagtgtttttttttttttttttcacaacttcatctctgtgccgatataaggagaggggggaacatggaaatcatttcccactttcggcatatcggccaaggacatggcctcagcgagtttgaacaagcagcatcatggctttgtgccagagaaagcctgctcaaaggttctggttcatgttccattgtttccagccagaattctctgacatgatttcacaaaataatgatattgaaactatgataataattattataataaattttgttctagaatgattttttctgttttctaacagagccaagtacctatgttgctatgaagatcataagacatttttgcattagaaatgtccatatctctctcttcttgtcaaggaggaaggaggctaaatcaggattaattcagatccagtagagtgtgtaaggcatctagcagttaatggccaagaatatgatatcaataccattgagtctgaacacagtaacctccaagacccaatctccattctgccattttttccactaatgtattcttcatcctcagtttattatggattagactttcctcatccccaaccacccccattctgcaactgtaagagtggtttcccccacagcagaatgaaatataaaccctggtattcacctgttttatactcttagaattcatctgcctgatacttttcaagaggaaatcaaacttgcttatcttaggcaaaagctcaagaaccaaaaaaacataaggagcttctattcagcatcacttaacttcagaaccagactgcaaaatgacttggcatctgtctttagaatgataggctttggggcagggccaagtgggtgcaggattgccaatgaggttgggagcatgtatgtaagggcagaacagaacagaacttgctcatctaaaatacccaagagctattttgcagtgcatggtggttatggagaataatctcaggagggaattgtgtggatccctctggccaaaaacaggactaatgtgctatttcagaatagaaagggatagaaggataagctgaataggggaaggcaagcaataacacaggcacagacaacaagagaagccatttgaataaaaatcatttgtaatgagattattgctgtgggatcagaatgataacatgaaatgtacagtcaagatgtatcaagtactaggagaagctgtatagataggactgcctctcctggcagagtcccatccttttctatttcctgggctcatatggcctcaggatggaagcccccttttaaatgaggggttgtccgtgatgataaccatcacttatctgtactcagtgcccaggagatgagtatatcagccactttgctcattcatcacacacttggtgagcattacatttgctcgatactgcctcaagctctttggggaaatacaaaaaataagtaagtcatgattcctgcccgcagagtataacatctggagagatggtcatgggaactcctgactcttatagagggcacgggtagtatctactagagtcaacaagatcgtgtggaaacaagtgcaacattgaagctagcttgctagtggctaagaacacagtgcttagagccaggcagacccaagtttaaatcctgagtcttgaacacacttgctatgtgacccagggcagatcattgaacatctctaagcctctgtttcttcacctataaaatgggtataacatctatttcattatgctatgaggagcgaatgaaatcttatatataaagtaggatattagggaaaattttgtggaaatcgttgcttttgactttagcttttaaagaggagaatgatttcagtggggaaggagacagcaacactagcaatgtggtattcctttttatcttaagaacataaacatgatgttgataaggactatttgggatatttaatgctttacttttgtgtgtgtttggctataaatatatttggagtgactctggagctgttgatctttgccaatttcacctcaggaattcaaggagttgtggaagcctatcagagctgtcttcctaagctccaactctacggtcccaccaacattgcccccatcatccagaaggttgccaagtcagcgtcagaggaaactaacaccaaggaggcatcggtaaggagggggctatttgcctcctaaggggagcttactcttcctcacctggatattggccgtaagacccatctcactctaacaataaattccaacacttctccctgtgtgaatttggacaaatgacttaacctcctcctatcctcagtcttgacatctgaaacatggggataatcaaacccatctttgctgggttgtgaggctaagagatgacacatgtcaaatgtctaccacattgtctgaacacaggagaaactcaacaatggaagctactatattcactaaagtatgtcatatccacctcctgtccttgaaaagaaaaaagaaaggtttaaaaataagcttgctttttaaggtacccatactacagatggaagcaaagcaccatggaagtaaaacaatggatgattctgcctcctggtggtaaagcgcagcagcacaaaacatcacagcaaaaattggtttcatattctattgcttttcttaagaaaaatgcaaaccaagaccagagtttgagttttgcccctaatattttagaagtaaatatattaccacaataacttctgtatttattttaataacattaatacatgtctttttagctttatgattttttccagatttagtggaatattaccaatgtctgaagtttgctctgtaattttatcctgggtactgagtttttatttaaaaaaatactactcccttatcttcttacatcaattcatctaaccttcttgcactgtcttcatgttctcagccttccttcatgttagaatggatggaggaccatgctcctacctcatgtcaacatcttcttttgtgtacttgagcacatctctgaattatccaggaactttgactctgcagttatattctcgctctttctcctatcatctattgttttcttttctacttccctttgtactgaagactcattcccattaacaagtactcattcaataatatctcctgctttaagttaatatctcccccttgactctgctttgccctttagctactgtccttaactttttcccacttataatctgcactccatgcagaaaccagattgatcttttaaaaatataattagtattgcagcattcctttgttctaaattctctaatacttctcatcatacttggagtaaaatctaaattccctgatatggcttagaagacattataggatctaatctctgcctacctctctgatcttaattcttatcattttctctttcgctccctatatttcagccacactgaccttcttgctgttccacaaacacaccaaatatattcccaccttgaggccttttcacttactgttcccctgccagggtttctctcacccaaacctccatatgatccattctctgactgtgttaacatctcttctcaactctcaacccctctgaaagttccccctggctaccttatctaaaatagccaacccacccacccgcaccatgtctcagctttacttttcttcttagtacccatcatcatctgaaatattttaggtgcatctactaacctgtatattttatgtctctctactttcatatggaagctctacaataagacttgttcactagtatatccctagtacacaaaacaatgcctgcacacagtacatgcttaataaatactacttaaagaacgcatataaagccactctacttttcatatatatatataatgaaaagtactttacattttcttttgtaaaactggtgtgtatcttaaatattgcacatcttgtacgccagaaaatacagtgttcctgttttcattataatttgaagtctctcctacttaaaaagatccaaattcccaaggtccctagagagaacaacagtcactgcatgtctttggttcagtccactggcccttccatacatctcattatcatcttcagctactctgggcttgggtcattgagtgacatgagcaattcctacaagggaataggaagtttgaagcaaaattttgttttagactcataatttttccatgtccttttattaacatagttgaccacagtttcaatctgctacacaacatccatcaggtgacccatagctatccataagaaacaaatgggtctgatctgtggggcatgttctctcatctcctctgttcattacatcatgttcttgaaatcactaaccggtggtttgactatgaaaaggactggagaccctggggagctaagtgtgtgttacttcaaataattactttagaatagtgaatatataaaactgtggatatattagcctttatgctgggcagagacactctgtaagctgagatcttgtccagcagtaatgctgaggatttaatccaagccaagtcttttccaggtgtgaaagctaagaaaatcatgactcctctctgctcatttttcctcttcttttcagaagccatgaacactattaggttttttttttttttttttttttttttttttttttttttttttttttggaaaagggttttggtttttcccccaacctaaagggggggggcacaaaaaggggtcactacagttttaaacctttgggggtgaaaaatttctttggccccaccctcccaaaaagttgggaccaaagggttgggcccccccccccagttaatttttattttttttgaaaagggggggttttgtttttttgcccaggctggtttaaaactccggggctaaaaaaatcctctttttttacccccccaacgttttggggttataggcatgacccaatgcttttggttaaccaccaacacttttaaggattataaaccaacatttcccccagggggggggccctgaaaaggcttccccaaatgcatttttttttgaccacaaagggtttggagcaaatttgacccttcttaaatccaaaatttaggaataagggtgggatgggaccatttttttattttattttttaaccttttttaaacaccaaaaccaatttttaaaatgataacttgcttaaaaactcccatttaaaatagacttaaaaaaacacttttcttgccaaatttggtctaagnnnnnnnnnnnnnnnnnnnnggtcttggtctatcacccaagctgaagtgtagtggcacaatcatggctcactacagctttgaaccttttgggctgaagcattcctctggccccagcctcccaaatagctgggaccaaaggcatgtgccaccacgcccagctaatttttatattttttgtagaggtggggtcttgctatgttgcccaggctggtctcaaactcctgggctcaaacaatcctccttctttagcctcccaacgttctggggttataggcatgagccaatgcatctggctaaccaccaacacttctcaggattatagaccaacatttccaccagtgcgtgggccctgcaaaggcttccccaaatgcatctctttctgaccacagaggtcttggagcaaatttgaaccttcatagatgcaagatttaggaataaggtttggatgtgaccattattttattttattttttaaccttttttcagcaccagaaccaattcttcaaatgataacttgcttagaaactcaacatataaaatagacttaaaaaatacactattcttgccaaatttggtctaaggagtagagtcagaaacttgtccattctctttagctcccttatcctcaagagcatccaaggcatccctaagggctccctggggcccagtttaaaaattggatgatctcatcccctctggggtaccaggactcacatggctaaaaagagaacagaactaacaaaggtctggatttcaggctgatatagaacagcatgagtttttggccatcactcactccctcagggatagctgggtctgcaatgaaaggacaggtcattaaatgggactacaagtaagaagcatccaacccacacatctccatataaattacccctatagaccaagaacataagcttttccccagaggtttctcctgttctttgaaaagtctgtggtccagagtcccttgttatctctaagggtcataaacttgaacatctttggcaagctgtgccagggagtctgttgctataggattttccccttgattttgtggaactcttccaggtaaaaaatgcccctctttatctaaacaggacctcaagtatattcaaagactataatatttcatccatgagcattttcccagtctgactttagaaggaactgttattgtttgctttattggaaatttctatcaggtttcgatcctgcagtctacagcctagtgcctttagctagatgaaacctggcaggatcagattccagaatcctgacaatctcttcagaccaggagttcttaaacttattgttccacaaacccctttagcagctgataaagttcatagatcccttctcagaagtggttttttgtgtttttttgtgtgtgtggttttttgtgttttgttttgtttgagatggagtcttgctctgttgccaggctggagtgcagtggcagctcactgcaacctctgactccctagttcaaatgattctcctgccttagcctcccgagtagctgggattacaggcacgtgccaccacgcccagccaatttttgtatttttagtagagacagggtttcaccatgttggccaagatggtcttgatctcctgacctcatgatccgcccacctaggccttccaaagtgctaggattacaggcgtgagccactgcacccagccagaagtatttttaaatgtacaacataagacccatattataaagtaaaccaattatattgaaatgcagttagcaaaatattttttaaaaggaagatggagacatcataaatacagtaataaaatgcttctgtatttacattttaaattatgagaaccagtagtttgtctaataattctgtaatttctaagttgtgttaaacataaataatacattgaaatatatgtaggtactgtaatataacaggaaaatatgtgtttttttattaataactaagccacaagtagaactaatattaatttgatttgttgattacacttatagtgaaaaaatgataaattttacttagagattagtgaaaataaaaatgtaatttaccccaagtttacagactgccttaaatcttgcagtagtccatggagacaggttaagaacccctagtttagatcagcagtcaataaactataactaaactaaactgtttttcaatggcttgcaagctgagaatggtttttagattttttaattgttgaaaaaatcaaaagtagaataatatttgtattttgtgacatatgaagattttgtgacattaaaaatcagtgtccataaataaaatattattggaacacagcctctcatattcattttaaatattgtctatggctgttttcacactacagtggcagtgttaggtagttgtgacagagaccattatggtctacaaagcctaaaatacttattaatgtcccttgacaaaaaatagtttcctgacctctgctgtagaacattacgactctaaagtttctcaatgtggtagtatgactatcaggttgttttatttcttaaggcatttatcaggtaggggagattcatccactgaactctaagatcagatcagacaggagttaggggaaggtagaggataaaggtaggagacacagaagtgtgattcactcgagggcccacctgctcatgaatcagaagtaatctctttttggatgtgccacctgccctggtcttccaggtgcactctagagagggtgacttatgattctggtatgtcctatactccttccctccatccccaaaccaccaacattgcctctttctgccgcttctctctgcacctccctaccacctccatcacttcatcctactgaaagccttctctaaactctcaagccaacttccttgtgaacatatacaactcagaaaatacagacatagaaggaaacatacaacttgaatgaatctgaaaaccaaactgggaattcagctaggactaggggtgagtggttagttaatggacatggaacagaattagcctttacattagactgtatgaaaagcattcagaacatgtggctatcttcatcacagtgtgaagttcacctacctccagcttacatttttcatttaaaacattttttcaggctcacagaaaaaaaatgaaattctttagtactaccaaactatttgcaacattaagtatatgattctcaaaatcagatgttttcaaaatgtcactcttctatccaatctttctcctttgaagtatggtaacgtggaatggcttaatctcactcttactacctataaatgttaggcatcttgcaggattatattgaaagttcttttctgtttagcctgagctgcatctgactaatctgcttctctttcctcttaccagtaaaggccatcatgatgcctctcatgttgactaaaaataatgatgacctccaatgggtcatccttctccaggccccagagcactttccaaggcttccctgtgctgctgagtacagcacctttcctccaattcccatctctgctgagtcatcttccagctttccagatggaaaggggccaggcaggctgcaggccagaagtcaggacttaaagcaggaagccatgggagcactgcaaccttctgcaagtgtgcctggagaagagctgccacctttgtggcacatggccttcagagggagagactgcaaccctgaccctcttatagcaggactttagactagtgccatccagtggaaatataacacaagttatgtatacagttttaaattcttcagtaactgtattttaaaaagtaaaaagaaacagagaaatccattttaattatatattttatttaaaccaacatagccaacatattgtcattttagcatgtactccatataaaaaaattattaatgaaataatttgcattctattttgtataataagtcttcaaaatccacatgtattttatacttacagcatgtcaatttggatgctaagttatcataaatacttgatctttgtttagattttatagttacagcttaattttaataactacctcactgacagttacaaagaaagaaaaagtagattaatctactgaagttgttccaaacatacttaaaatgtttctaataactgaattggctatccaattttaatgttaaatttaaattcattacaattaaataaaatataaaattcagttcgtcacttgctctagccacatttcaagggctgagtagtctcatggggttagtcatcattgtattggatgtcatagctttagatttttaaatatcttcaagtaaagaagatcatataaattattgggtcccacccctcatttgagaaatgaagaagctcagacacagacgagttaagggatcgtcccagggtctcacagaatgaggctttgaagcctgtcctcctaactcttggcctgctgctctttctttgtaactgtcagtgaggtagttattataattaagctataattgccatgcctacctttaagctccattcatcagaaccctaagcctttaggactatcagcacattcaaaaaatgtctgtcatcactgttgctttggtcaatgtgcagtgaggccacctgggtgtctaactggtattgtattgtccttgtctccctcacctcttcaccccccccatcatcatggggcatctgactgcagcaatacttcatcctgctgatcctgacagatggtgttatcacagacatggccgacacccgggaggccattgtccatgcctcccacctccccatgtcagtcatcatcgtgggagtagggaacgctgacttcagtgacatgcagatgctggacggtgatgatgggattctgaggtcacccaagggagagcctgttcttcgagacatcgtccagttcgtgcccttcaggaacttcaaacacgtatgcatatacacattggggcacttttcatggaagagcagaaccaaagcatgctcacctcccacatttgtccaccaatgtttatggtgatccaccattcttgaagcaacaccagctatgctctacatacccttgctgtgggagatgacctggcttagctatcccttcctgggccacgtcatctcccacaacaaggatatatagagcatgactctttggagaaaaaaattataaattgagttacagatcaggagccatgctaactattgtaggcaaaatttcactgatgcttgccctataattcatataatttaggatctctagtgcatctaggactgcctacagatgggcagcttgttccctgcctaaaggtgcctgcccaaagtaccaagcagaaactgaaatgcagcttatgttttgcttgtcaagctatgtggcctggcagaagtctgtgtttgccttggcaaagtatatttccaaaatgatagaaacctaaatcctctataaaaaatatagtaagcagcatcaaaaatttatttaactccttcaaaacaagatgataaagttagttcaaaagagtatataaggctgggtgcagtggctcacccctgtaatcccagcagtttgggaggccaaggtgggtgtatcgcctgaggtcaggagtttgagaccagcctgaccaacatggtaaaactccatctctactaaaaatacaaaaattagctgggcgtggtggcaggcgcctgtaatcccagctactcgggaggctgaggcaggagaatcacttgaatcagggaggtggaggttgcagtgagccgagatcacaccactgcactccagcctgggtgatgagagtgagagttggtttcaaaaaaagtaaataaataagacagttaaagtcagtgggaaaaaatgctgaataagtttgctaaggtagattgaaaactgattaatgaccaagagggtaaaaaaaaaaaaaaaaagtaatctttgaattgccctctctgtgggccagaaatcgcctgctatcagttttctataaattaatacctaactttacagtcttgggctcttaccagtaagaaatagtaagtcagtcaagcagcattgcattccccaagggccttgaggcagaaccattagacaatgctctagtatgacatagaaaaaatgctcagtaacaattttcccaccttcccaggttttgatacattgtgtccatggaggaaggagcattttttaaatttccacaaatccctgcacctactgagctgtaatcacccagaaggacatcttgaattcataaaagcctcccttggggctaatggtagtcctgaagacccctctagagtatcctagctgtgtctaggcacctgtgggggtaacttgggtattactggatagcctttgtgttttttgttttgtgcttcttgtgaaagccacccaagaggagagcatatgcccagcccctactttccactgaggccttgccctctgcactgctgcagatgccaacaataccatccccagggctggtgactaaacttgagctgccctggcaacagggaatcttcagaaccttcagtaccgtgaagcttatctgtggtctccttggaaaagaagagaatcctctcctttccatgctaccgagtcccctctgtcacctgagtcattaatgcagtgagatgtgtctccacatctcaaagacccctgctggaaagtatcttcattaacttccactgcagtccctccctgcatagggctcaaatcagttatttgggtcaggcaggatgccatcccctccacttcaaccttatttggtaaagcctttctcctccagtcaaaaactcattcaaatgaatccctgacattcttcatactgagtttatcagatatatccagacacatctgactcccaacttgggttcacactggactctcacctatactgtgtaaggaaattgcagatgagaggtggaaagctaaatggatcatcaaaacaatgatccatccatcctcccacccccatacatacttgactgtaatcctggtaccagtcctagtgtgagagcctttagcatatgctcttcagaaattgctgtttgttgtgccactttctttggacaggctttaaaataagaattcagatagatcaccagctcagcagcctcagctgaactctgtatttcatgacctgcccagacttcatagggaagtaactgcacattccaaggctccttggatgatgaggtattgttcataactgtactgccacacaattactactctacttttaaggagggctgcagtgtaattaaaatcactgaaggagcagaaaaccaatccctggctacagagttgatcacagagagagtttctaagtaacagcaacagcagtcaatcttcccacaagctcccagggctgtgcatgtggatgaggggtaattgtgttgttatatgccatcctcaagtttccctaggaagagattttcaaataaaggtactcattaatgaaagagatgcactaagccctaaagttgtctgcctatggacagcaaggagtagagtcaaaaagaagtagtattctttacagacggatgagctagagcaggctaaatttgctgcaattatgttcattaatgaagctagtttctccctaggtgtctaagatggaggaaagggtgttcttcctgattttaatgctgcattcttttcagacagacaaaatagatagacacatcactgaataccagtgataactttgcatagtgcagcaggatcaaagagttcactctctaggagattcattaacttccccaaatcaccctctctcccctctgcatcccccacctccccacttccccacacacacttgtgtgctgacacaatgtcactgaactatgaaaggttctaacctctaccctcaagtctcctcctcttccccaaaacacttacagaatgcttgttctgtgcaaggcacatgctagtcactaggaccacaatgaaatgatagaaccatggatccacacctcaagacatttactggagaattgcatgactgggagaaaggtattagcagaaaaatcacatgctaagcaacctgtgggtggttgagaagaattaaaatgttgttacaggacctcaaagcagagagaggtagccatgggaaaaggcttacagcttaagttaagtgtttgaggaaagacagagccttggagagcagggaattttggggacattgtcaacaagaggaatgctcagggcagagcaaggaagtagggtgctgctcacagtctctgtgctacacagattctctggctgctctgtgaatgaccaaggaagaacaccaggcgcatactcacccatcttatcttcatggatttcaaatcagattttgaaatccatttcattacccaaactaatctactttgaattcaataagccataaataaaagggaaggtagcagcttaaatcattttatgtaagccattaactcatgaattgcctctctttttgtgctgtgcatgataactcagagctttagagcttacagggcacaagttatgttatggtcttttttcctgctcatataacagaatatcatagactggataaagaacagaagtgtatttggctcatggttttggagtctgggaagtccaagagcatagcaccagcacctacaagggtcatctcatggcagaagtatggaaggcacaagcaaacatgtaagacacaaggagaaggaaagcacaaggggcagactctcttttataacaacccactctcatgataactaacctgctcccatgatactgacatcttatgaggccccacttcccaaccctgttgcattgatcattaagttcccagcacattaatttaggagacacactcaaactatcatatgctttaagctttgtgactctgggcaagttatttaacctttccatgccacagactttcatctataaaatgaggtaaatgatacatgcattgcaaagataaggtgttgtctatataaagcttaagatagtgcctggtccatgtaggtggttaataaataaagcttttattactgttattaccagcttcattcatattcttgaccctttcccacccaatacatgtccccaaagccttatttgcttgccagcacagatatgcaaggggatgggggatcctttgggaacaatgctgtccaatatggtagccactaaccacatgtagctacttacgtttaaattcattaagagaaaataaaatttcaaactcagttcctcagtcagacttgccttatttcaaggactcaatagttgcgtgagactaagacctcccatactggacagcacagatatagaatattaccatcatcagaggaagatctatttgacagcctggtttaggaatattttttgctgcaagcaacagtaaatccatcttacagggattacataaatggtttttaaccaagggtaacattatgccccaggaaacattttggaatatctgacatttttgatggtaacaaatatggggcttctattcatatctagtgggtagaggccaaggatgctgctaaacttcctgcagtgcaccggacagtcccccacacaaagaattattcagccccaaatgtcaatagtgtcaagattgagaaaccctggattatacaaatagaacgtatttttctcatgtagctagaagttaggggctcattgctgctggagtcagtgattcaatagtgtcagagccagcacattgtgattccctttgctcttcctacataatgataaaatggttgctatagctccagtaatcacattctatttcaagatagaaaggaagaggaaagggacatagggccaactgtgtccagagcatgttggctgaagtcccaaactaagtcctggactattacaatggcaaagggattaaaccaaaatgttcatcagaaatgtacaagtcttcagggctgggtgcggtggctcacgcctgtaatctcaggactttgagatgctgaggcgggcggatcacctgaggtcaggagttcgagaccagcctggccaatatggtaaaaccccatgtctactaaaaatataaaattagctgggcacggtggtgggcacctgtaatctcaactactctggaggctgaagcaggagaattgcttgaatccgggaagcggaggttacagtgagctgagatcgcaccactgcactccagcctgggtgacagagtgagactccatctcaaaaaaaaaaaaaaaaaacagaaaagaaaaaatgtacaagtcttccagaacactagcaccatgacctccacacacttttacagagttccgaaatactactcctgctaatatttcatatttaatacttttactactcctgtacttaaaaaaatacatacacctttaaaaatagcacattttggtgatttttaattatctgaaattttttttgcatgtgtagccctgagtccagaatctgttaaactcttgtattgttgaagacttttcacaagggaaaagtcttttaacttttaaccaggagagaaaagctttccaaaaaacctcccccaggaaattttcacttatatctcaaaggatggaattgggtcatattgttatccctagatgtaaaggaagctggaaaatcaaggatttgactttctaacctttgtatgagaaacagccagggaggaaagggtataaatgacttttgtatctgccccagtatacacatggaccatggtctaacacacaaccctgagcagttatttataaaataaagggatatctgtagatcacaaatgtccatcatgctatgacatcttcaaaatgtgaaagatcacttgagaaaaactctttacagtgttttcagattgcttaaaagatacatgtctcttattttgagactctgtgagatagagtgaattatttttcttttctcttttgcctctaagaacagcggggcttagtaaagttaaatggccaagtggcaagccacatagaaaagaaaaaactgaaaaccaggtcacatggtattcagtccagccctctttcttttggaatctcaaacacttgttaagtctgcctcaagttttcaatctcttcaataatagttaataatgaggctcaggccattgaaattgcttgcccaggggttgtacagttaatactaaatgccagagccaggagtaaagcccagctctacatgactccagagtccatgtatgatatcagcttcaacctttctctgctacagaatcatcaccataaatcacatggtcctcctgtgcccctaccccaaaatcatgcagtagatccataaggctgatagaataaaggctaaatgaattagtgtggtattcaagactctccatcacctggtctcaagccaattttccaaccaaatgcccaaccaatcctgcaactacccctaaaccccctcgtcccccacctgccatacacacttccttcagctccatcaggtaactcactatgcctatgatggtcaaatgccattcccctaccccttctctatgtattaaaatatgctcagcttaaaagccacctcctcttagaagcctccaagataagttagtctctatgttttttatgccctggcctcactgtttgtgattctctagagaagagcttctcaaattttaatatgcatatgaatcactagagcgtcaagttaaaaggcagattgtgattcagtagctctgagttgggtctgagtctacattgctaataagctcccatgtaatgtgacactgctgctctatagcatgtgtcatattctacctcatagttaatattggccatgcctagttcccctcgtgattacagccttcctgaggcaagaaccatagaccctcaaaccctagtgtggcacctggaacataaataagtgtctaaaattgagtgaaaattagaaataaaactgcagaacaattcattctcccatccaacttttactcgtcttcagatgtaaatagttttatagtttgagacaggcataaaaatatataataatgaaattaaaggtccattttccaacaatctgacaactattgcttgaagtagacccttgacaaataacgaatgaatgaaagtgaatgaaacttagctgcccagagcaggactcaaatcttttaggatgagtctgattccttgaccagaagccaacgtcatgatgatttcttcttccctgcaggcatctccagctgccctggcaaagagcgtgctggctgaagtcccaaaccaagttgtggactattacaatggcaaaggaattaaaccaaaatgttcatcagaaatgtatgaatcttccagaacactagcaccatgaactccccacacagttttacagagttctgaaatactattcctgctaatatttcatatttaatacttctactactcctgtactttaaaaaaccaacaacatatacacatttaaaaatagcacgttttggtgatttttaactatctgacaattttttttgcatgtgtagccctgaggcctggatctgttaagcccttgtattgttaactttttacaaagaaacacagataacaataacttactatttacattacagcatgtcgccttgaaataaaatggtatctgtatccattttttatacaggtttgttgaaattttgctaaatttcttatctttacactctaaagcattttgaaacatttactgaatgttgatagacgaaatatacttggttttatctgctataggatgagagactttttaaaatggcagatgcatggactgtattttgcatgtttaaaataaaaaaagaaaaacccacatggtttttgcagttgttatctctaattcctccctgctgagaatggtctctctactaaagaagaggtttatttacttcttctttctgaggtgagtctttttgaggtaagtctgggtcatctagcccagcacctctcatactttatactgtgtacacaaatcacctgagagtcttattaaaattcagattgtgatacataggtctgtgtgggacccaagattctgcatctttaactaggtcccaggtgatgctaatgcagtccctggactataccaagaggagtgaggatctagactttagggtgtcatgatggagaccatcaaaaacagcgtggcttctagtctgcttgagaatggcacctcttcctgacagtagcacaaaagtcctgcctgtctccagaggtgacagtagaaagtaatgagactgactccagaagctgcacacctcaaatcagtctcgctgctttatactcacacctcttccttagataagactagaaagtgctcctcctggccagtccctgccctcttaaaagtggcatcacacaccactgcatggatggtgtcaatccctagaagtgatctcaaagcgtcttcactggaaccacaacaatagaaacttacacatggcaaatggctatgcagtacagctcccgatatctggtccactaaattgacctttgagcttagtgtgggaatttcttgcctcctttctatcacttctgagaacaaattctataagcagaaatgcctggaattattgtctggggtcgaggtgttttgtttcaatataagctggccagtctggaaccaaaaggacgaatgtttaacttgtataatcttcttgcagggaaacaggcaagtgtttttgcaagcataaaaggcacaaagtggagtttatttttggtcagagagatgaagaagtaaatcacaaggcaaaatttgttgtttgtttgaagaggggagcagtattaacaagcaaataaaatgccttctatgatttccacagttacaattatagatcctaatcttgcaaatacatgtcaccaaatgcacaacattttgggaatgatggtaaaattgtatgactgaaaaaatcataaatatttaagctatattgttttattaataaattgggtacttacagaattcttctaagagttgtggtcttgtttctcttttcaaggcaatttcctaacaataatttatttcatgtaggcaatgtggccttagagtagaagtagctctttcacagtccaatgaaaacatggatcactgcttctaataaacaagaaattaaaatatttaggtgcaatattacagaaatatctggtgattatatctaaccccaaaccaagacatgaacttacatgtctatatacctggaacacagtaaacactcaacagacatttaataaatacagagatgactaataaaataagtaaatgaatgaatagtcttgttaatatgccttatgatcaatctttaatccactgtagatttcacaggtaggttaagtgtttgtgtctatcaattaaatgatgcaccctgtcattcacaaagatctgttaggatctctacactcatgtcaggattcctggagtctgtgagatggggcagagaggacagagtgcagttggcctggcagaaccttaaagcagtttactttccttttcacagtcagactcaagttcatctcaaaagaacaataaaaataatatctatgaattattgaagggtgtcttagtcaggtcaagttgctataacaaaataccataaactgggtagcttaaacaacagaaatttacttctcacagttctgaagtctggaaagtcaaagatcaaagtacaagtcaatttggctcctggtgagagctcacctctggcttgcagacagccactttcttactatgtcctatcatgatagagagagagctagctttctggtctcttcttataagggcactaatctcatcacaaggatcccaccctcatgacctcatctaagcctaattatcttcaaaagtccccacctcttcataccatcacattgaggggtagggcttcatatatgaattttggagggacactaatattcagttcataacaaaaggttactgtgtgccaggcactgttctaagtgcttgtaatgtactatctcatttaatcctcccaacatcctcgtgagatcggtagtattaatagccttactttgcagatgaggaaactgagacacagagagattaggtagcttgccaggattgcacagctatggaagttcagagccaggatttaaatatggatactctggctcctaaacccaaattcattgtataatccccatttcggctatccttcttgcactatactcattcacttgccatatcaagcagcagattattaggaaatttgagagaaattagccttaaaatatcctttgctcccaaattcagaaagatccgtctcatctgatgatctcagattgttgttttgggcacttggtgtctcgtgatgtacaacatccccccctgaaagcaatagaaaattctcaagccacagccaggtctccccaacttcttgccatcaaggagaccatttaggttggacattacaaatacagatgcttccaagagctgtgcaagccataggaataactaagaaaaaaacaggttttaacagagggacataaagagtaaagtaagaagaatggagggaaactggaacgcgtgtgtccagaagaaggcagctgctacccaggtccaggggccatgcaagaatgtggacctaatgcagccagcccaaccagttttttaagaaaactgaaaaacatggtatttcacataaaacctactgatctataaatattgaaagctcatttaaaattcagtaactgtttaaaaagacgacaagagctggttgggtgcggtggttcacacctgtaatcccagcactttgggaggccgaggcaggcggatcacctgaggtcaggaggtcgagaccagcctggccaacatggtgaaaccccatctctactaaaatacaaaagttagccgggtgtggtggtgcatgcctgtaatcccagctccccagggggctgaggcaggagaaccacttgaacctgaggcagaggttgcagtgagccgagatcgcgctactgcactccagcctgggtgacagggcagggcaagactcagtctaaaaaaaaaaattgcaagaaccaatctgtgcaagtcaaatgaaaactacctctgggcttatgtttgctctgtgtgcaaatttggaaccactgagttatatctgtgtatggcctgctctccactgggtctcaacagataatatacacactttaaaattcttgaagaccctaaagaggctttatttctgtggcttatatttattaacatttgctatattaggaattgaaactggaaatggaatatatttattaatttatttaaatagcaataatagacccattacatgataacataaataaaatactttcataacaaactatactttcaaaaccaaaaaatggtcagtgagaagtgcagcattgctttataatttttcaaatctttagtgccttgtttaataaaagattgccagatccttatatctgcttctgtattcaatgtgttgtgaaatgatgttttggttaaagtacaatgttgaaaacctggcctcacgtggatatgtagttggaaagaggagagctatttttagctatttcaggtaattgtccttctttttaccacatccaaactcaacaagtggtagttttttaaaggttagttgcaatgtagaatatgaaatcatatcaataaaattgtcctagcattttcaatggttcttttacccatgcactattttgtagcatcatgtactgggcattcagaaaatattgatccactcagctatttagatgttccaaatgcttgcacagtttattttataatatcaaaaaaccctgcattttctattgctgtacaatatcactgctgatctcaccagacagtctttaagtatggagaacttgtcaaattatggtggcaggttcaggctttccaaaactctaatctttgttaggaagctcaaatgttatcattgccaacaaatactgtcagttgtttttcttgaagtgacaggcttacttcaatcatttttaagaaaatatctcccaagtctgaatagctctggcttatctgtcagtcattttacaagtaaaaatgatgttctatgaggaaaaaaagcagctagatcagctccaaacacaatggcatgtatgcgtttccttgaggcaaccattttaggttaaaatgcagcaaaagcactttctggtgctttacaatttgtctcccagcatttgaaaaacatgaactcacgggtcaaaatttaataaaaataataattttcctactgcaccaggaatagtgttaagtaaaactgtatgttttttcttcaagtgtgtgatgatggtgaaaaatacagggaacactagtaccatgtggtgccactttcttgatgtgagctaaagccccaacagttttactcaccatcgcttttgcaccattgatgccagtgtcaatatagagaaaaaggtgaaaaacattttaatgttattatgaaaatagtttttacctcagagaccccctgaaagagtctcagggacctcactctgagaactgctttttatagcctacttgccaaagttgtatttgtttgctatttctgcataacacatctacaaacttagtgtgtaaaaacaacacacattgataatctcactgtttctataggtcagaaatccaagaagactcaggtgcatcctctgcttaaagtctcataaggctgaaatcaaggtgtcagtagggctgtgttccttactagatgctctggaaagaatctgcttccaagctcactccggttgttggttgcagttgcagaactgaagtccctgttttcttgctggctatcagctgggcaagaaagtagaggggagggcagtgtcagggatggtggggtgggggcagacacaatctttactctgaagggcttctcacattccctctcacgctctccatggggccccctccagcactgatgtgtccttctcaaacattgactctaacttctttttctgctgtatttcactgactccagccaaagaaagttttctgcttttaagggtttatgattagattggcccacccagacaatccaagatcctaagctctgtaaccataattatatcattcaagtcgtaaacccataaacagaacatgtttatgggttccagggactagggcttggacttatttggggggccattctgcctaccacaaaagaagaaatgcaaaatattactagatgattcttagagtaaacgtgggttgttcaagaatcgtaaaaaggcttcccatggtaatagaagaaaaatacagaccaagtcaaggagtggcgttaaaaaatactgctgattctagaccttgcctaggagaggttattctaaatctgcttgaatacctcccgttttttagtctaccccacttgataagcaccaaccttgcactaggcttggggtgagaactagggggatgggagttaaagtgagagaggcagagataaaaatatttggtccctgctcctggaggagctcacagcctagagctgccctctgactctaggactttgggatcccattagacatattatatatgccttaacacttaagacatttactatttgtggactttctcacgaagatgttctcaaacattgaaagtagagcagtggtgtaggaagagaggtaaggacacaggtgagaagaacaatcaagccagtcaaccatgtttatcatcatcccctcccttgccctccacatggaatagataatcaaattcctccttaaaaaacttctactctctaatcctgtcttgactcagtgccttcctcttgagcacggtatgtgaaaatacctggtgttttcaagccaaaacaacatgaattcaaatccaatctctgctatttaagagtgggatggtatctctgagcctcaacttccccatctgtagaagagggagaatgattcctactttgacaaattgctgcgatttcagataatgtatgcaagcaccttagaacaatgtctggaggttgtattccctgaaaagcaaactctaagatcaagattagaatgcagatagactattaagggagtattatcaggatcatgaactgcagaaggaaagaaaaggaagaggcactctgatcccataagaagctttgaaggggcagccctttgaagtgatcccaagctggggaaaaggggcctggcctttataccccatcatagataagccagcagatacctcaaaagaagggttggttttggtcaaagcatctcttctcaactaaggaaatttcagaaaagttgagcctctgggtctcagcaactgaaagaataaattctcaagcctgaatggggagatctgggttgcaaaacacaacatctatgacacctggcatttgccacactactcggtatattgtgacatttgcaattattactgccatcatttttttgttattaatttttaaaatttttatttattttttgagacacagttccactcttgttgcccaggctggagtgcagtggcgcaatctcggctcactacaacctctgcctctcaggttcaagcaattctcttgcctcagcctccttagctgggattacaggcatgcctggctaattttgtatttttagtagagactgggtgtcaccatggtcaggctagtctcaaactcctgacctcaagtgatccacccacctcagcctcccaaagtgctgggattacaggcgtaagccaccacacccggtttttattattatattattttgttgagacacagtctcactctatcgcccaggctggagtgcagtggcgtgatctcagctcactgcaatctctgcctcccaggttcaagcgattctcatgcctcaatctcccgagtagctgggattacaggcacctgccaccgcacccggctaatttatgtatttttttagtggagacggggtttcaccacgttggccaggctggtctcaaactcctgacctcaggtgatccacctgcctcggcctcccaaagtgctgggattacaggtgtgagccaccgcgcccgaccccggctaattattttcaatttttgtagagatggggtcttactatgttgtccaggctggtcttgaactcctggcctcaaacaattctcctgcctcggcctccaaaagtgctgggattacaggcatgaaccacctcgtccggcctctccctgagtaacttcagtcactggtttcacgctcacagtattagcgtacccagtcattgacgccaggcatagcgtccacactcatggctgcagtccgggcatacagcaagggctcaccacagaacgaacgcagtggagctgggagaataccggaggtctgagaggaacctaagcagttcccgcccctcctctatcacatggcagtcgggtaaagtgaggccgggagagagaggcttcagcggctcacccggcccccgtgggcctggatccagggcgtgaggctgtgcgcgtgctctacgctgagtccggcccgggtgtcccccagctcggccacgcgccggctcagctccatggccagggccaggggctcctgggaaggaggcggggacccggggcatgctcggcttgggcgagagctgtcctcccggctacagaacagctccaccaggcgggcgaaaaagccggaggccaggctgatccgcttgctgcggcagggcggggtccgaggccagcagggctaggcggagatttcagttgctcttgctgttccagccgctgggccaccaaggcatagaagtctggagtagctgggccaggctctgaaccatagcaggggcggatgggcagagaccaaggccgaggggactcagagggggctgctcctcgccccagggagcagggaagacatcttcgaaggcggctcaggaagtctgttggctcttcttgggcagggcttctaggtggatttggaacaggagacccagcagcctcaccacgcctaaggaaggcagctaggaccctcagcgtgtcttcccggagccccagctcttcagagcctgccatggaggcacctgatctggggccccactgccacctcctccgctcaacttgccatctcctccactcaactcctactgtcatcatttttacacttctttgtatagccactgctcctgacttattctaaccttatcccctcttgtctagaatgtaaaagattttcctaactggtttctgtaatccatattaccttcatccaatctgctctccatactgctgccacagtggtagttaggaaataaatctaagcatctcattgccctgcctaaaatactttagtggttccccaccaacttcagaatgaaatcctaatttttgaatatgaccttgaacataacatgcatctgactttcatcctgatccttgcacactttttctgcccacttttagccaccccaccccaccctacactgctaacaaactcttcacattggtttgttgtttcccccatcccaccccttcacccagttaatgtctacttatcttgggagactcagctcacatgtcaactcctctcagaagccctcctaggcctggcacggtggctcatgcctgtaatcccagcactttgggaggccaaggtgggcagatcacctgaggtcaggagttagaaaccaacctggccaacatgatgaaaccccgtttctactaaaaatacaaaaattagccaagcatggtagtgcacacctgtaatcctagctactcgggaggctgaggtgggagaatcgcttgaacctgggaggcagaggttgcagtgagccaaaatcgtgccactgcactccaggctgggtgacagagcgagactccgtctcgaaaaaaaaaaaaaagaaaagaaaaaaagccctcctaaacctctcttccctaccctagattaaactaaatatttaccttgtggattccctttttacctgtgcatacctctgtcagaacttttctccccacctagtacctcagtttctcccagagaacagagccctgtcttacctttaaactgagaccctatttagtgcccaatatgtgattagagcatgcagaattaaatctgtaagagaagtcatccttctggtgggaggggaaccacttacagtagaccctcagtgcagttttttaggaaatatagctggcccagcactttgggaggccgaagagatcgaggccaccctggcaacatggtgaaaccccatctctactaaaaatacaaaaattagctggatgtggtggtgggcgcctgtagtcccagctacttgggaggctgaggcaggagaatcacctgaacctgggaggtggaggttgcagtgagccgagagatcacaccactgcactccagcctggcaacagagtgagactccgtctcaaaaaaaaaaaaaaaaaaaaaaagaaagaaatatagctggtaagcacaaatcaaattctggtgcattaactgttattacaccaaaattctcagtttagcaccaagattttgaggcaaacattattaagtacaacaagcttataatacaagaaaatgtgaccagtttcccaaggtttatgcaatgcaattatgtaattcagatgtcccccaagtttctccagccttccaacaaaatatcccgacaggaatgttatcatcctgttggggtattttgttggagctagatagaggtggtggctcacaacattttgaatgtactgtcactaaattttccactttaaaatgactaattttatgttatataggttatgttatgtgaatttcacgtcaacttaaataacacacaataaaatgttgtaataccccagtttattagattagcatgccacccagtcactcacctg

SEQ ID NO: 5 - DNA, 1965 bp, Homo sapiens
ggttgacaggactgaggtgattcgcacctgcataaacccagtgtactcaaaactgtttactgtggacttttactttgaggaggtgcagcgcctgcggtttgaagtccatgacatcagcagcaaccacaatgggctgaaggaggccgacttccttggtggcatggagtgcacacttggccagattgtttcccagagaaagctgtccaaatccttgctgaagcatgggaacacagcagggaaatcttccatcacggtgattgctgaagaattatctggcaatgacgactatgttgagcttgcattcaatgcacggaaattggatgacaaggatttcttcagtaaatctgacccatttctggaaatttttcgtatgaatgatgatgcaactcagcagctggtgcaccgaactgaggttgtgatgaataacttaagcccagcctggaaatcattcaaagtatctgtaaattctctatgcagcggagacccagaccgccggctaaagtgcatagtatgggactgggactccaatggcaagcatgacttcattggagaattcacctcgacattcaaggagatgagaggagcaatggaagggaaacaggtgcagtgggagtgcatcaatcccaagtacaaagccaagaagaagaattacaagaactcaggcactgtgattctgaatctgtgcaagattcacaagatgcattctttcttggactacatcatgggtggctgccaaatccagtttacagtagctatagatttcactgcctcaaacggggaccccaggaacagctgttccttgcactacatccacccttaccaacccaatgagtatctgaaagctttggtagctgtgggggagatttgccaagactatgacagtgacaaaatgttccctgcctttgggtttggcgccaggatacctccagagtacacggtctctcatgactttgcaatcaactttaatgaagacaacccagaatgtgcaggaattcaaggagttgtggaagcctatcagagctgtcttcctaagctccaactctacggtcccaccaacattgcccccatcatccagaaggttgccaagtcagcgtcagaggaaactaacaccaaggaggcatcgcaatacttcatcctgctgatcctgacagatggtgttatcacagacatggccgacacccgggaggccattgtccatgcctcccacctccccatgtcagtcatcatcgtgggagtagggaacgctgacttcagtgacatgcagatgctggacggtgatgatgggattctgaggtcacccaagggagagcctgttcttcgagacatcgtccagttcgtgcccttcaggaacttcaaacacgcatctccagctgccctggcaaagagcgtgctggctgaagtcccaaaccaagttgtggactattacaatggcaaaggaattaaaccaaaatgttcatcagaaatgtatgaatcttccagaacactagcaccatgaactccccacacagttttacagagttctgaaatactattcctgctaatatttcatatttaatacttctactactcctgtactttaaaaaaccaacaacatatacacatttaaaaatagcacgttttggtgatttttaactatctgacaattttttttgcatgtgtagccctgaggcctggatctgttaagcccttgtattgttaactttttacaaagaaacacagataacaataacttactatttacattacagcatgtcgccttgaaataaaatggtatctgtatccattttttatacaggtttgttgaaattttgctaaatttcttatctttacactctaaagcattttgaaacatttactgaatgttgatagacgaaatatacttggttttatctgctataggatgagagactttttaaaatggcagatgcatggactgtattttgcatgtttaaaataaaaaaagaa

SEQ ID NO: 6 - protein, 491 aa, Homo sapiens
VDRTEVIRTCINPVYSKLFTVDFYFEEVQRLRFEVHDISSNHNGLKEADFLGGMECTLGQIVSQRKLSKSLLKHGNTAGKSSITVIAEELSGNDDYVELAFNARKLDDKDFFSKSDPFLEIFRMNDDATQQLVHRTEVVMNNLSPAWKSFKVSVNSLCSGDPDRRLKCIVWDWDSNGKHDFIGEFTSTFKEMRGAMEGKQVQWECINPKYKAKKKNYKNSGTVILNLCKIHKMHSFLDYIMGGCQIQFTVAIDFTNGDPRNSCSLHYIHPYQPNEYLKALVAVGEICQDYDSDKMFPAFGFGARIPPEYTVSHDFAINFNEDNPECAGIQGVVEAYQSCLPKLQLYGPTNIAPIIQKVAKSASEETNTKEASQYFILLILTDGVITDMADTREAIVHASHLPMSVIIVGVGNADFSDMQMLDGDDGILRSPKGEPVLRDIVQFVPFRNFKHDAAKSVLAEVPNQVVDYYNGKGIKPKCSSEMYESSRTLAP

SEQ ID NO: 7 - DNA, 24261 bp, Mus musculus
tacactcccatgttgccctcacgcagcctggctaggctggacctaggacccctttctctatgacacatctggttaccctcagttttctctatgacacatctggttaccctcagtggccagaggtctcagagctgaggccattccagatacccgagactcatcttctccctcccaagtaggaacgagtaaagtaaccctttccccactcttaagccccagagacaccctaggcaactggaaatgagcctttaaggcttggtaagggcattcatagcccctcccaagaggttcttgatctacatctgccctccatgaccctctgagacccactcattcttcccagaagcctctaggtctattattgtctgtccataagcctcttgggaatctttcatctgtcctgagcctagggccttaaacctcccttctcaaaatacttaagaggattccccttatctccccaaggagcctaaaaacttcctcccctttatattctctatatccttagctgtcttctcataaagccatatggcttcctttgtcttttgcaggagcgtctatttttttcttaattattatttatttatttaatatacatgagtacactgtagcagtcttcagacacaccagaagagggcatcagatcccattagagatggttgtatgccaccatgtggttgctgggaaccgaattcaggaccactggaagagcagtcagtgctcttaactgctgagccatctctccagccagcccccttgcaggagcctctagttctgcaaccgccttcccatgatgctctggacccacatgcccttctagtcgcctctgggccttacatctgccttcccatgagtctcagcgactcatgttcacacttaggagccattattcccatgtacatagcacacaccttttcagagatgaggtagaggaggccctaagcatagaaggggtcatgcccacctagaccctaaacagcaaagcacagccagtgctagacttcaaagctacatggttccagaatccatgtccaaaatgagtacaggtgggagggaagagggaagtccgggagacacagagtactcactctggaacattccatggtggcccagagctccctgaccagaactggaaaagctcagtggcctagagaggagacacggatgagggtcagacatcccctgtggccattacagccccatccttccatcccagattctccacagcccccaacccaagccacctgagggccagaagggcccagcttggcctggagggaaggggcggagatgagctgtgccgaagacatggtggccatcgtctggaaggccttgtccttggagacttggtcctgaggaatggttgagattcaggttagtggggagttctaattaagttctaattaagatagccagggtgggatgaagacatggggagccgtgatacagggtcagggaggggtcagctccccacccaaaccttctgtctctgctggcctcctctggaagggcagtgtgtgaggtacagatgtgggaagatgggcagggggactcagcacattcagagtctgacccagggtgggggaaggggccaagggaagaaagaaaacaccttaggaactgcaggttctacttcatctccctgagcaccagatgaccaccctgaggcagcgagagactagggctacccatggaacaggtcacacctcagcctcagagaagaaaggtttgcacgcccacaataagacgcttatggttttctaagtcaagaaaagcctggacacagcgtttcctgatgcccagggaacaggaagggagactttccagatgcccccggggacaggaaggggtgtttttattccagacagaacatagaaaagactgagaaaggaaagaaaagatcagaacctaagggtttcaggcctacaaaaaaggaagggaccatttccaaataaaagaacaggaagtctcattcctgaagctaaaaggaaagcaaccccacagagggccagtgacacgggttcaggcttgagggcacagggactcatggtagagaaaagagagtagatgacaatactttctcataggaaagtgcacagccaagggaggcgaggatggagtgggggacaggaaaagatcagcagggacaggggagggaaggatgggagcagagagagcaacctgtttgctacagcagccacatgacctctgcttgatgagcaggccagcacctgcaggcaggctgcctcccctggggtctctgaccctccagacctttctctctctctgtctggatttccttcactggtgtgtgtgtgtgtgtgtgtgtgtgtgtgtgtgtgtgtgtgtgtgtatttcaccaactctctgtctctgtctggccccacttcccatgtatgtgtctttctctctgggttgtgtaccctcctctatcaaaatctctctctctctctctctctggcctccccatctgtctgagtctgtctgtctgtctctgggtctgtccctctttccccatccctccctctaagcatcccactcagcctcccctgccaacgccctcccacctgcctttaccctcaccttcagcttggactgaatttctctcgatttccttcgagccaaaacctgaatatggctggagacctggagggatgagaagcaggtctgagcatccttcatcaactgccctcccttcccccggaggccgcacacgctgctcttccacaggtcacacagcatgaaatcaaaggctgtctaaagtgtaagcctccaggcccaggcccctctttgtaataaacctacagaaatcagaccgacaagacggctcagcagtaagagcacttagcaccaagcctagttccaaaggtccatccctgagacccacatggtggatggagagcaccaactcctgaatgttgtcttctgatttctacatgtatagtatgtctcaaggacacacacatacacacaccacacacacacaccacataattttctttaaaaagtacttaaaattttttgtgatatattttatgtatgtggattaggtgcatcatggtgcacacacagaggtcagagggaaagttgtgggagctgggtctcctaccatgggggccccagaaactagctgagctaaggtaatcaggcttagcaacaagccctttacccactatgccatttcacgggcacaaaatgtaaacattttaccgaaatatccggcatccccacaacttagagaaaaaccacacaacaaggccagaaagacgatggttcagtcagtgaagcttgccctccctgcatgaggactttagttcttcagtccttgtatactcaatcccggcactaggagacacagataggtgcagactggcacttgctggctacccagtctagtcaaatccgccagttccaggccagtgagagagccagtctcaaagaagtgggcagctgctgagatgaaaccggggtctcccactgacctccgcatgctggcgcatgcacacgcatgtagaggggcctcctacactcacatatacatacgaaccacatcatcagccttgaacctgacccagcccacatgaagatggccctcaggtaatgcccagccccagaccaaagttccaaagtgtcactcctgagacctgctttcgcgttctcgtcttccctgtcctcagcttgatgtaacgggcaatgagttcgttccggcctggaggagtcaaaatggaaaagagtaagactctcagcagaacttcctgccagagaagacagggctgagggataaggtcagcaagccaccaatccccaccaaactacagtcaagccaggctgggggacacctcagccacagggtcagcagctcagccgtgttctagctatgtggccatggacggatcacttagtcttcctgtgcctcagtttccctcatctgtgcaggaaaaaaaaatgctagcgcctaagtcatgggaaggacacaatcctttttcttcgttttgtattttgtttattttcatatctactcatttatttttgtttatttatttttggctttttgggacagggtctctctacatagccctggctgtcctggaactccctctatgtagaccacactggctttgaattcacagatatccacccacctgcctctgccacctgccttatttttattattttgagataaggtcttactaggccaggctagcacagagctcagtatgtagctgagaatggccttgaactgttcaggtgtgtgccaccacagttggccagactctggacacttgggttagtgtgacttttctccctggggtcaggacagccaccacaggggactcaccatacatcttgccctcatctgacaggatgatcttgcgacggccacagggagggtagatggccagggcctcctgaaaactctgctcaatgtcggggctccacacaccttctgcatcagggctgccatcacctccaacgccctcgctgcctccggtgccctcttcgctgccttcctcgctacctgtccagcccccgccatcatccaggggggccccagtccggggatcccccatctgggcctgcagagatgaagatcagcagctacatatggtattgcaagaacaggcaggagcactgcctgagagagaaagccaggcctgaacctgaacccctgggtctgagggaaaaagaggaacctaagcctgggacctgggaggctgttcttccagtgaggaatttgcattgggactgcatggggttgaagccacctgaccaactcaggtgcagtgcctgaggctgtgtttggatttagggaagaccagagtctcgttaattggcaggagtgagactctcctgtcccactaagaaagaacaggtgctcagagaagggcagcagctgctggagaagcagaggctaagtccaaaaccaacacccagagagaaggggacagagagatccagggacaaaaatccagatcgacacagcaaaagggggcatagtcagggcccagaccagaaagtaaccacagaatcaggcgggggcggggctgggtgcccatcaaacttcaggccttgggactcagtcgcccagccatctggaggacagaacaaagagcccaggcatcccctcccccagttccccacaacccctgctgtgggcgaggccagcatgcgagcagcggccccgcccctcccccgggctcggttccagcccaagttcccatcgactttccggaggccaagaacagggaaaactttccccatacagtcagatacctcctccctagaggttttatgttatccagaactcccaggaccccaaagttctgagtcccatccctccaattttggactcttgacctggtagagagaggttaggtgaacaaagatctcaagcccagcccagtgtcgcgacgacgttcaggacccccacaggccgaaatcccaacccagcccacccccatgtggccagacaaagagacagacgagccaggcaagacagacggacatctctaatctcctgacccagtcaccaatcctcggaagaccaatggccgaaggtccaaggggccctatggctctcccttggccactcccgctcctgccctgctccgtgtgggggccacatgcccacagggcggatacttgcacgaaggatggcccaggggtcgaactaacagaagacccgtggtcgctccttcgctcccacatccgcagcccccggccaccccgcgcgctcccccagccgcagaccatccccaggcccctaactccggagaaagttccagctccacacttcggctgcgtcccccgcgcaaactccggccccggggcagaaaagggctccgggcagttcccacgcgatctcaggaacacgcgcctcacctcatcgcgcggaacttcccaccccaactcacaaaccccaagcaggatcccgattcccgccggcgccttcctacctcccggcctgggcaggggagccgcgggcgggcggggcgagacccagagaaagttgccgggagctttgtttgggaaaagtgggagggaccgggggggggggcgggcccggcggtaggcttggaatctcacagggacactcgctgcgaggtgcttgctttaggagagatgagtccatctaaggactgggtagggttgctggggtccctaggagagaaggtggttatgggggcctggattcatgactttagaggaggaggctggggtttgtaactctgggtcttaaagaagaatattgggatctggaccctgggtctgaagaagaaggtactgggagttgaagggagtagactcccagatagaagaggagacatgacctgggtcaccctgggtgtttgctgaggatgtgggattgacagatacaaaataatctttaccaaacttatgtgggttttttaaaaaagattttatttattttcttaatgtgagtacattgtagctgtacagatggttgtgagccttcatgtggttgttgggaattgtttttaggactgctgctcactccggtctgctctgttcggccccactcactcagtccctgcttgcttcaccccaaagatttctttattattacacataagtacactgtagctgacttaagacacactagaagagggcgtcagatctcattacaggtggttgtgagccaccatgtggttgctgggatttgaactcaggaccttctgaagagcagtcagtgctattacctgctgagccagcccattttgtgtttttattttactctgttttttaacgtttacattttatctgtatgttttgtctgcatgtatacctacagaggccagaagagggcactgggcactggatcccctggaactggagttacagatggttgtggtcaaccatgtgggtgctgtaagtcaaatccaggtcctctggaagagcaggcagtgctctcaatccctgagccatctccagccatgtatacttgtgtgtgtatagaagtgtgggtgtggggcgtggtagcacatgcctttaatcccagcacttgggaggcagaggcaggaggatttctgagttcgaggccagcctggtctacagagtgagttccaggacagccagggctacacagagaaaccctgtctcgaaaaaccaaaaaaaaaaaaaaaaaaaaaaaaaagaagaagaagtgtgggtgtgggtgtgtaaaagtggagatgaaggtcagaacccgggacctcacaagggctaggcagaagttccagctcagagctgtatctggtccaaccagtttctgtgtgataagtaaagtgctggggtgggttggtttgcttctgatgagaacacagcttccttgtgacctggccagagtgaagcctgttgggctggaccccctgcgtttctgaagatccacagaagtgcagactccacaactgcttaggcactagtggctgcaagtggctcctatcccacttagaggcagagcctggctgcctgagggcagagagttggaacccagggttttgttctcttcaaactgaaggtctgggtaagagtgatatcactgagttacagtcccagctcctgtggagttgaagctagccagggtgttctagtttgttttctattactgtgataaacaccatgaccaaaagttggggaggaaagggttaatttaagattgccattgtgatccatcaccaaatcaccaggaaaggaacctggaggcgaggcaggagctgaagcagagaccttggagaagccctcctcaccggctcgctcagccttatagcgcctaggaacactggcccaggggcgaaaccacccacagtcagctggcccctccaacagcaatcattaaatctctgccctcaggcacccaggctctgtttatcctgggacaggggccatttctgtggaccttcagaaacactgggagtccaggtcaataggcttcctgctggccaggtcacaaggccctgcagacttgcctataggccaatctgatagggatattttttcaactgaagttccctcttcccagatgactctggctcttgtcaagttgacaataaaaaaaaaaacaaaaaaccaaaaccaccaccaacaacaaaaactaaccagcacactgaaatacaaacatcctttgagaaaacagacaaaatccccccagccagccagccaggtaatggtggcataggccttaatctcagcactcaggaagcagaggcaggtggaccgttgactctgaggctcctggtctacagagtgagttccgggacagccagggctacacggagaaaccctgtctcaaaaaaagaaaaagaaaggaagcaagcaagcaagaaaatggctatgagctggacagatggctcaaggaaaagaacttactgccaaccctgacaacttgaattcaatgtccagatctctctctctctctctctctctctctctctctctctctctcacacacacacacacacacacacacacaggtcacactgctcagcatagttcaaggccagtctgggatgcataagaccctatttctaaatttaaaaagcaaaaatatgagaaaaagaggaaaaagaagcgctggctgtcttcaaactcaaagccaagagtcgctggcatatgggctctgtgagtctgaaagggaagcttagacttgggatttcttgggaaatataacacagggctgtaattaggggttttttggaggtagctgggttttttaaatgaaatcatccggaaaacgagaaacatctacagtaatgctcggagagtcaataaatgagggtaaaccagatggcggagtgctgaaggcacttgcagccaagcttgagttcgatccaggggacctacacggtggcaggtaagcagcaactcctgacagttgttcactaccaggcatggtggcgcacgcctttaatcccagcacttgagaggcagaggcaggtggatttctgggttcaaggccagcctggtctacagagtgagttccaggacagccagggctacacagagaaaccctgtatcaaaaaaccaaaaaaaaaaaaaaaaaaaaaaaaaggttgttcactgacctccacatctgcgccatggcagttctgtgtgccaacactccgaataaataaaattaaatgaatgatcttagacccagatatgggtgaacagggatccaaggagttctggaatacagaggcgtgacctgggtggagcattgctctagtttaaagggcgtggccatctgtgatggatggttgactcccttgggagagttaggatcagagaacagtagacagagaacaatagggttccggagctgaggccaatgataagtccaggtaatagaggctggaggataagatcatcaagtggaagcgtggttatagaataggagcgtaatcaggagaggacctagtggtcagacttaagggaagtaggtagtgaagaatggaggtcatgaagaagcatgcgcacgggaggaatgtttatccctgggcacatcaactccgggcaaaggcagggagacaggtggctgtggcttaaagcacaagcttgtgccttccagagagatccggggagaatttaggtaggtcagtgggcggaggcgtggtcaggaaaaagagggcgtgtccctttgatgagtcatagccaaagaggaaaatctttcttaaaagacgttgttgccgaaaagaagggtggctctcaggcaccaggtaaaataaatgcctgttttatgagtaaggtcaccaggtgtagacgtggccatccacgaggagtatggcttaagaggtgtggtcagtcaacaatacagatgtggatatgccagagacccgatggtggagtagtgaggatcctaggcgaccgtgtgtggagggcgtggtgagacaattagggcgtggccagtctcgcggagccctgacacccaacgaacgctccagtaatttgcccaggctcgagaccagaactggatattaactgtccgtatccggcggtgtccggagccgggtgaccgggtgtccagcagaaggcgcgaatgaaggcaaaggtaaggtactggatctgagtgaggctaaacccggataaggggcgcctgaaatggagagaacgcctacagaatccagggggatgcagggcaggtgggcggggcggagcgggtccctcacctagggtcggagcctggaaagagccgacaaggggtgattgtgggatctgaaactgcccttgtcacagcctcccacccacctgcaatgtgtcgactgagggtcttgctgctgctgctccccttggccttcgtgtcctcctctgctctccccatccatgatgtcgactctcagcagaacacctccgggttcctgggccttcagaggcttctccaaagctttagtcgactgttcctaaaagtgagtgatgggacagagacatgaaccaggcagaaggcagataagaaaaggagcaaacagaacagagagagttggagataagtcttagatgggcgagtggttgtctagcatgtacgaagccctgggcctgacgtcctgcaacaattacaccagcactcaggaggtgcaggccggaggaacaggagtgggaagccaccttcccctacacaggaagtttgaggtcagccaggaatacgcgagattttgtgtcgcagaaaagcaggtgttgggttgaacagatagttgggggacatgacaacacaaaataggaagagaagccggacctgtgattgaaagcctgtcatcccagctagcaggtcccagatgtggctaaggctcccatgaaatcccaacatgagaaagaaaaaaaaaaaaaaaagaaagaaaagaaaaacaagttcaaggtcagcctaggcagctttcatcaaaccctgttggaaaacataaaaagaggcaggcctggcaacccatgcacttgggaggtaagagacagggcaatgtctggatttgaggccagcttgccctgcatatcgagttccgggtcagccagagctacatacatagtaagacccagtcagaataaatcaataaaaagaggggttatagtggctgagggtgtgactcagaggtagagcccccaagccgggaggctgagggtgtggttagagggtacggggcttacctagcatgtgtgggtgagagggagagagaaggggaaggagaggtggacgccaggacaggtgaggaacaggagcagcaaagcaatgggacaaaaagatggatggggtttagtggctagaggctctggggatcggtggaccgaatgggactgatttggagggcaccctggaaggacagcgggtgtgcacaccatttccctctggccctagaatgacctgctacgagacctggacaacttcttctcctcccccatggacttccgagaccttcctaggaacttccatcaggaagagaaccaggagcacagaatgggcaaccataccctctccagccacctacagatagacaaggtgcctccctccgcagggcagcccttcctgcgctctccccaccacccatcaggctgctttccctgacaggaggggcaggtgagggaggaaagcaggtttgttctgactctcttgtgcaaccctcacaggtgactgacaaccagacaggggaggtgctcatctcggagaaagtcgaggcctccattgagccagaacggaacccggaaggggactggaaggtaaggaccttccttgccccgaggtgtccaggaatcagcatttttctatagccattcaccctgtgccatactgttccagtttcctctctgctgctgtaatgaagtattttagcccaaaacatacaaggaaggaaagggtttatctggtttgcatcccatcacttagggaaactcatggcatcgtttctactctcaagagcaaacagagagaaaacatatttgcttgctttctcctgtcttaggtggttcaggatccattacttaggaaatggttccacccacaatgggctgggtcgtcctacatcataaccatcttgatctagttaataccccattcagactctcttctctgctgattctaagctgtgacaagattggcatttaagattagccagtatacactccatacatggaatatccttgagatttctggagctcagtgtaacgtgtcaaaagggagaggacaataggcatggttaaacaaacacagatgatccagtacttgaaaagctgagacaggagggttgccacgactttaggcaaaaggcagaaaggatctctgtgagttgaagaccagcctggtttacaaagcaagtcccagcccagtgggggctacatatcaggaccctgtgtcaaagcaaatataaatgtcagaaagcgttttggtcgttccagaaagttttaggctttcccaacagctttataaatcttagcattcaaaaactccaccaatcccagaaatctggcaggccagtaagcccccaggatcctccagcctggacctcgtgagtgtagccattacaagcatgacctgcagctccctgtcactctgtgaatgctggagtccagactcaagctctcagatttgggcacaagtaccttttgacagtcccctttctgagacagggtctcactatgtagccttgactagctctgaattgtcaatgtccctgcctcaacctacaggtagctgggaaaacatgcctgaaccatcaggcccaactgaaatcagggtaatttcagaacaggaatttggcataggcaaccaggaatggtgacacaccaggaatggtgacacaccaggaatggtgacacaccaggttttttgtttggctttactttggtttgggtggtttggtttaggttttggttttggttgttagagatgggatcactctctgtagccctggctatcctagaacttgctttgtagtccaggctgtcctccaactctaagatctgcctgcccctgcctcctaagtgagtttaaaggcctgcagtaccattcctggcaaaacttaaggcttttgactcagggtgatccaatacttggccacctcccaaatgcggggattctaaatgtgaaccatcgcaccaaatttatcatttgtttttgtttaatttttgttttgttttgttttgtttttttccaagatagtttttctatgtaaccctggctaccctcaaactcacagagaccctcctgcctctgcctcttgagtgtgggggagtaaaggcgtgcgtgcaccaccactgtccagcgaatgcttgctttcttgcttgctttctttctttctttcaaaaaaaaattttttttaatttttaaaaattgttagcacatgagtgcaggtacacacaatggccagaagagggcatcagattccccgagagctggacttaatggagcctgtgagatacttaccatggggtgttaggaatccaaagaatatcttctgcagagacactaataatgcatgtaaatggtgcacacactcaacgctcaggcacaccaggtaaacatagatgaaataatctcttaggcaaccgtggaagtttaaaaataatcaaattttggtgctggaaagatggctcagcagttaagagcactgactgctcttccaaaggatccaggttcaattcccagcatcaaagtggcagctcacaactgtctctacctccagttccagggatctggcaccccctcacagacacacatgcaggcaaaacacccatgcacatgaaaataaacaaatcttaaataataaatttaatacacaagaatgcagcaggccagacagaaaacagaactgtctgcctaaaaagggttttttaagcagcaagtgagctgtaatggaggttgagatggcccagtggagaccaaacatcttggatgcgctgtgcggcatctgaggagctccccgtgcctcattcccaggttcccaaagtagaagcaaaagagcccccggtgcctgtgcagaaggtcaccgacagcttgcacccagagccccggcaggtggctttctggatcatgaagatgccaaggcggaggacccagcccgatgtccaggatggaggccgctggctcatagaaaagcgacatcgcatgcaggccatccgggatgggctccgtggaggcgcccgtgaggacagcctggaggatggggtccatatcccccaacacgccaagctgcctgtcagaaagacacactttctctacatcctcaggccatcccaacagctgtaagtggggaccagatgtcccacaccctaccccaacaccatatggaaataaaggttttcttacatctagctcaatctccttttggtatctcttcccaaacaggccagaataacgactccatcctacacatacactcagtgctgacaatggctgtgccagctcttccttacatctcattcagaacatggcctcttggttgggcagctggatctcctgtagcaccatgatacacctggttccgaaaccattgatccaccctgtctgccatcccaagtctttaaagcacattgctgagccaccccagccaccaaaatatatattttttagattttacaaaattactcaagatctcacaaaagggaaagcaaatattgaaaaattaatattatgggggctggagagatggcttagcagttaagagcactggctgcccttccagaggtcctgagttcaattcccagaaaccacatggtagctcaccaccatctgtaatggtatctaatgccctcttctggtgtgtctgaagatagcaacaaggtattcatagacataaaataattcttttttaaaaagttattattttaaatttatatgtataaaaattttgttggcatgtgtgtctgtgcaccatatttgtgcctggagaccagaaaagggaatcagatctgctgggggtggagttatagaccctgtgagctgccacatgcgtggggcataaaaccatgccaggaaattcagttaggcatagcaagttcagacccagagactctgtgcacacctgaggcttaggcgactccctgctcccccaccccacccacagactcctgacttggaacacatgccatgcttcgcacataaatgtgtcaagctgggcatggtggcgcatgccattaatcccagcactcgggaggcaaaggcaggcggatttctgagtttgaggtatgattttacacatccattttccgccatgacaataaactgtttagaatcatagactgtctcttttcatcaagatctgctgtgggagccatgaagaaggccttcaccttcagagccacaacccactcccccatagaaggcttctctgcgctcccagtcacaacctccttcccttaccaagataaggacaataatccctgtgagactagctggagttccccttctcccccaacccctgccccaggctccaggctagatgctgtccccagacctcaggcccctgctcttccaggactcccagccgtgccaggatttccaagagtctgagaaccccacaaccctggccttgtcacaggcctgggaccccagaaggagctctggctttcccaccctgggagcaatgtcacttccttacagcccagcatccaccccagaggcagtatgggataagcccagtcaaactccctgcttctgtgtcctgagtggcctgcaatgtggatgctgggaatccatctcaggtgttctggaaaaacatccattgctcttaaacagtggtctatgtttccagccccaggaatggatgttgataatagggacaaagctaacagggtccagaatgcaccacaagttgtcctgaaaacacccggcagacctttcatctagaccaggcgtcctagtttgctttctactgctgcggtgcgtgagcaccacgatcaaaaacaacttggggtgagcaccatgatcaaaaacaacttggggagtctatttcatcttgtgatagatcacagtccatcacagagaagaggcagggtaggggctcgaaggaggaactgaagcttgctcagggttttgttttgttttttttcatacaacccagaagcaccttcccaggggtggtcttgcccacagtgggctgccatccacatcactcattaaccaagaaaatatccccacaggcttgcctactgacagggtaacttttcagttgaggttttcagatgactctggcttttgtcaaggcaacaaaaaactaaacagcacacacagggtctgatggtcagtaaggtgagaaagaccttgcactttttgcctctacctcccgagtactggtacactaccctgcccaattcactaggccctagggattgaatgagggcaccctcagtcaaacaccgtacccctgagctacatgcccagtccttatcattacatgcatgtgtttttaaacagcaaggggtaggaaagtgaacatgatagggtctgcatgtggaattcaggggccctccttgcaccatgtgggtcctggggattcttctcagatcgatcaccgggatgggtggcaagtgtctttactcttttttggtttggtttttttttttttttttttttggctttttcgagacagggtttctctgtgtagccctggctgacctggcactcactttgtagaccaggctggcctcgaactcagaaatctgcctgcctctgcctcccaagtgctgggattaaaggcgtgcaccaccacgcccggctgttggacccttaataataaaaaagttcgaatagtccacaggcatggactgaggcagggtgattgcttcaagtccgaagccatcctgggctacatagctaagcagtaagtagaaactataatagtttgggaaaacagcttgggtacctattaatgcggggggcgggggggggggagggaatggagcggaagtgaggctggaccagactgcgcatcattgtgacagtggcgggcgagccagacccaaaagaaagaacttggttcaaagactgacaagaagaaaaggatgaacagggagtccttcggttgaactctctcctgcttggccctattttgtcaagcagaaggaaaggatttttgtaccgcagaagaaagctgccgataatatcgcgccatcaccgctagccccactagtgcgcatgcactcgatcctcaggtccagcctatcctcccgagaagctctacgcatgcgccagctcaagggtcttcgtaaggagagacccgggcgccatccactcggagtgcgcttgcgtgagtacaagagcctgagagggcgggacttgcaggaggccggctcatttgcatttctggcgggaaaaggcgcgtgtgaacacgcctcttccgtgacattcgcaaccgccgttcgtcgctggtgtccctcaactgagtcccgactccaggtacgccctgcctgtggcgactttcatggcaggttccccggtaacatcacctgccagctccttcaaaaacgccccaagttttgagacaaggtttctctgtgtagccctggctgacctggaactcactctgtagaccaggctggcctcgaactccgaaatcctcctgcctctgcctcccgagcgctgggattaaaggcgtgcgccaccgtgaccggcttcctcaggaaaattctagtggcaacttcggcaatcctgtcagactcttgaaacttccggttgctttttgttgcttgttttctatttttgtttgagacagaccctccaagtgctgcccaggctggccacgacctcatgatcctcattccccagttttaggattacagctctcccagatgtgcccaactgcaatcttctagaacttttgaaacctaacacttaatctattttgtttttgtgggtagggtaggtgtttttgttttgagacagggtttctttgtgtagcattgactgtcctggaactctctctgtagaccaggctggcctgtgtgcttctggttcccacgtgctgggattaaaggtgtgcaccaccactgcctggcttttgtttgggtgtttttggtttttgttgttgttggggttttttgtttgtttgtttgtttttgagtattttgccggcatgtttgtatgtgtgtcaggtatgtgcctgtggagaccaggtggttttgtatccctctgaactaaaattgcagatgaggaggagttcacatgtgtgtagtgggattccaacccatatctatctggaagagtaaactgttagtcctcttaacgactaagctaccctccagggactctctagggcttcagtaaattgcccagactctactcaaaaccttggatcctgctgcctcagcctcctgagtgctggtatcacaggtgtagcccaccacgccagccgctaggatcttctagatatcccatcagagtctccctcaaaaacctgtcagagacttttcctctgaaatcttggtggagatttggtgttcaagtcctatctgatactttagaaatctgtagttgccctacaagttccgccggggactctgaaatctagtgacaccccagaaatgcagcccttgaattctagtccagggatcccctccagacttcctccatgtttaaaacccacaagacactcactggccacctgatatcccttgttcctcaagattttgtccgagtttccccttgaaagagtctcagaaagcctcttctttccctggtgccttctaaaagcctctgagatggacagcaggaggatccccactagctgaagaccagcctgctttacacagcttcagaaggcccactacagctaaagctacataatatatatttactaagtccctgtctccaaaagccagataataatgtctccagaaaacattcggctgccggaatacaggcaaggcagagtgatggctgcattccctgaggaaagggagagaggctgcttctctccccttcggtgacaaagatataggctggatcactccagattcaaaatagattaaggcgggcttacgaggaggcatcaacctccacccacctcacacgtggagatcagtgaagtcacacatccaggctaagcttagcaaaggtgttttataaagcttagacggggagtgataacgtgccagctaggggctgggattatgtccttacatggtcaaaagctgagaccccgggggcggggggggggggggttggcacttatgggtggatagctggaaagtggagaggagaggtgttagccccaagttttgtccttgtgggcagagttgaggggagaagagcaaaggaggtttcttagcttttgcaggggatgagcaggggttccaaacaaacaaaggggagccaagcaggaggaaacccaggctctctctacccttggccccagtccctagagggactactgacagtgcctccttttctcctgaaagtgactggccagtcgggcgtggtggccagcactagggaggcagaggcaggcagattggatttctgagttcgaggccagcctggtctacaaagtgagttccaggacagccagggctatacagagaaaccctgtctcagggaagaaaaaaaaaagtgactggccaggctgtaatagaggcaggacagcactgtcagggtgcagaggagggagtccctgtgaccacagaagcctgtgagagtcaagcccactcataaatataggccttgggagtgtctgtaaagatgtctcagtggtaaagagcactgagttcaattcccagcaaccacatggtggctcacaaccatctgtaatgggatctgatgccttcttctgtcatgcaggcatgcatgcaaatagagcactcatataaataaataaacaaacaaacaaataaataaattttatttttaaaaagggggagcagcatggagatggctggtggaggagaaaaacaacagagttgattttcaacagagaagagcctagagagaaggcccggtggttaagagaacttgctgtgtgtcagcgtgagggcacatgcctttagtcccagcaccctgaagcaggtggatctcttgagttcaaggctggtattcctggcaagtgttaggccagccagatctccagagagagactctttgtttggaaaagaaaagaataagaagccactgagacacttactacttttgcaaatgaccaagttttgattctcagatggcacatgccagctcacaaccttctctctccagttccaggtgctctgatgccctcttctgacctccaccacatcacaaaacacatttaaaaaaaaaaaaaaaaaagggtgagaagcaggcctggtgatggccatgcacattctttttttgtttgtttgttttgttttttggggttgttttgttttgttttgttttgttttgttttttcgagacagggtttctctgtgtagccctggctgtcctggaactcactctgtagaccaggctggcctcgaactcagaaatccgcctgcctctgcctcctgagtgctgggattaaaggcgtgcactaccaccgcccggcggccatgcacattcttgccaaggcaaagagatcacaaattcaaggccagcctggccatcttagggtggctttgtttccaaatacaaagagagccagagtgtgtagcttaacagtagaacacaggtattaatcattagtaagcagctgccctgggatttgatagtagagcacttgcctagaatctaccagtgaaagattgaaggtgactcagtgataaaagtgactggaagtagggaagagcactaggaggccagcagtctacagaggaccccatggtctgcctacaggcagggagggagcctgctgggctgtagtcagctccagatagagtgaaatgttccagagaacaagaggcaggaaggcaagagtcccaagcagagacatagtaggagcagcaggccactttaccaaatggcatgcaggttagatgactgctagacgatatagcatgatttggggagagaaagctgctggcccaggccacactgtgcctctgttgctagacccaagcaggctcggactcaaagaagccacagccacacaggtcaaatctgcagcctgtgggaatggactggaacctggcaggaagctaggacatgggccacagagaacaaggtgagcccgaggtcggactgtgaagagacccagaagagagcaagatggaatctctaggacaggaatggtgacttgttgggttatggggaagagaggtggcctcaagccctaggggcaacagttgaccccaccctcttgcctccccctttgatcttgctgctgcctgctctcttcagtcctcaggttgccatcccacacctcaaagccataaaaacaggttggagttgggatggggatggcaaacaggttctgagaaccctgagggcctcgggcagtgatggagcagtttagtcagccgagagtgtggccagtctgaggaagccatcactctgcttgtccttgtaggagctatctggacatcctttcttttccccaaccctcctcacagtggagggaagctgagagcttcgacagcagctgtagaggagcatcaggagtggtccatggacctgccggagggccaggctggtggtccaactgcacagagtaagtatctgcctgcaggaggaagagggagctgcgggtcaggctgggagcaggagagatgctagggtgggcagaggcaaaggatgctaggataagtgtcaattgtgtgcctgtcacatgtctgccctatctcctctctggagggctattgaggacagaaggctccacacactataacacccacacttcgcacctcttactttgggtaaaacaggtaccctgtcacctctatccctcctactgcacttgccttcccaacactggtgtctgtctagcacctgcttagtctaagactctccccggagcatggctgtacagaccctgctccactcgtgtgtgtgtgtgtgtgtgtgtgtgtgtgtgtgtgtgtgtgtttgtgtgtgtgtgtgcgcgcacgcacgcacccacacagtgcagaagagcagaagatggaatccaaggttttatgtgtgctaggcaaccagtcacttctgagttgtgatcccatctcccagtgttgtttttgttttatgagacaggatctggatttgaactctcactgatcctagctcagcctctcaagtgctgagatgacattcgtgtaccaccatgctcagctctcatatttaatttttaattttttaaaagagaaaagctgggtggcggtggtggtacgcacctttaatcccagcactcaaggaggcagaggcaggcagatctctgggtttgaggccaggctggtctataaagcctggtctataattctaggacagccagggctacatagagaaaccctatcttgagagagagagagaaagaatgcatagctggcagaggggtcacacctatagaactgaagggtctgagaaaataagaaagttggaggccaagtcaagcaggtggtgtaaatggtatgttaactgattttatgtaacttggttcatataccgactgtttgctgtgttaagcctcatggaaacatgccaagttattcctgtgttcacagacatccttgagaactaggatgtgccttacactaacagaacgctccgttccagcttggcctgcttacgtgcaggagaagaagcacgtgcagtgggcctctgcacactggtgctgctgccccagatcaatgcctgttttgctgtgggcagatgcagacaagtgggcgtgggagccagcgcgcatcagctttcggaggaaggtgctggctcactgactcctgtgggccagcctctatctctatgtccctaactcctgttttcttccccgccgatctgtctctgccctatctcagcaactcttttccccaagaatcaccctcctggtttctctgtctccatctcctgaggctgtgctaacagggaggccagcctgatggggtaggaagctccagcgtctatataggcagttccgactaatgcaggaacacctgtcttttaggctcctgggagtcgacaagtacgcctgcagctttgctcaaggctgagatctgcaccccaacctcaggggtagcctctgcaaataggaggggtttacaggcaagacaccagcatgctaataaggctggctagcttgggagatgactggcatctaaaccttgcctgcaccagcagagggcgagcagccaccaggaattaggaccatggccaggtcagcttctgagattgcagactgaaaaggaagaacacacccacaggggaaagccgaggctgaaagacagggatggcaaagaagagagaaggcgcttgggacagagtatcaagattaagatagagtacagggtggggggagaaaagggactgaaggacacaggacagaggctgaacatgtgagagaggttggggaaaaatgagaacaatggtccagaaagagcagggtggtggtcatgcacgcctttaaccacagcacatagaggcagaggcaggtgaatctctaaattcaaggccagcctggtctacggggtgagttccaggacagccaggatgccaggactacacggagaaaccctgtcttgaaaatccccccccccaaaaaaaaaaaaaaaaaggagagagagaaagggggggggggacggaacagtgtcttccttcaggacctcaggaagggactatgcaccattggcctttctgggccacagcacagagtcctcctctgtaacacgggacggtggagagcagtaggccagctgaagtcttctacctccccaaactaacctgccctactgccctcccatgggagccagaagagtccaggtcaaactggggtacagcatcctggaagtgtcagggtgagagaagagactctgtgctggaaggtgcctgtgaccgcttgtgctgcccgtctgcctcagactcctcgtgtagggataggagctgctgcggtgctgacgctccatgagtgcctgtagttacagaccacgcagaggcccacccacatgcatccatttcttccccaaaagggaggggggctttctcagaggatactgctgacactcagagggggtggggggcaggacaggggtctctagtgccagctcagactctaaccctgcagccatgtgcaatgggcactcatctcagcaggccaggctgtcagaggtatgaaagccacctccagcttggagaagctctgtttattgagtgcctgctgtattcatgtgatgtgaatatagctagctgcaggccaacagaccctggaaaacaggaacataggcaggcacacagtgggtctgagccag

SEQ ID NO: 8 - DNA, 804 bp, Mus musculus
gtccagcagaaggcgcgaatgaaggcaaagcctcccacccacctgcaatgtgtcgactgagggtcttgctgctgctgctccccttggccttcgtgtcctcctctgctctccccatccatgatgtcgactctcagcagaacacctccgggttcctgggccttcagaggcttctccaaagctttagtcgactgttcctaaaaaatgacctgctacgagacctggacaacttcttctcctcccccatggacttccgagaccttcctaggaacttccatcaggaagagaaccaggagcacagaatgggcaaccataccctctccagccacctacagatagacaaggtgactgacaaccagacaggggaggtgctcatctcggagaaagtcgaggcctccattgagccagaacggaacccggaaggggactggaaggttcccaaagtagaagcaaaagagcccccggtgcctgtgcagaaggtcaccgacagcttgcacccagagccccggcaggtggctttctggatcatgaagatgccaaggcggaggacccagcccgatgtccaggatggaggccgctggctcatagaaaagcgacatcgcatgcaggccatccgggatgggctccgtggaggcgcccgtgaggacagcctggaggatggggtccatatcccccaacacgccaagctgcctgtcagaaagacacactttctctacatcctcaggccatcccaacagctgtaagtggggaccagatgtcccacaccctaccccaacaccatatggaaataaaggttttcttacatct

SEQ ID NO: 9 - protein, 245 aa, Mus musculus
PAEGANEGKASHPPAMCRLRVLLLLLPLAFVSSSALPIHDVDSQQNTSGFLGLQRLLQSFSRLFLKNDLLRDLDNFFSSPMDFRDLPRNFHQEENQEHRMGNHTLSSHLQIDKVTDNQTGEVLISEKVEASIEPERNPEGDWKVPKVEAKEPPVPVQKVTDSLHPEPRQVAFWIMKMPRRRTQPDVQDGGRWLIEKRHRMQAIRDGLRGGAREDSLEDGVHIPQHAKLPVRKTHFLYILRPSQQL

SEQ ID NO: 10 - DNA, 31516 bp, Homo sapiens
tgaaagcggaaaccccagcgtcagggcagtgcctgcccagccccctaccttccagctaagcaacccccctgcaaaaccctcagcccccaggtacttgatctgatgcttcccgtatccccattcagcagcagctccccagtgaccttccttctcttccagtctagatcccacacagcctgtcactgcactcttttttttttttttgagctggagtctcgctctattgcccaggctggagtacagtggcacaatcttggctcaatgcaacctctgcctcctgggttcaagtgattctcctgcctcaccctcctgagtagctgggactacaggtgcctgccaccacgcccagctaattgttttttgtttttttttttttggtgtttttagtagagacggggtttcaccatgttggccagaatggtctcgatctcctgacctcgtgatccacccgcctcagcctcccaaagtgctgggattacaggcgtgagccaccacactcggccctcactacactctttctctgacaataccgtcaacactcctgcctcaccgtcctgcagccacactacccaaccaatgcctagcctggatccatcagttcctctctgggctgagaaatacacccctagcccgccacggtggctcacgcctgtaatcccagcactttgggaggtccaggcagggggatcacttgagcccaggagttcaagaccaacctgggcaacatagcaagacccccgtctctacaaaaatcaaaaaattagccaggtgtggtggcacatgcctgtagtctcagctactcaggaggctgaggcaagaagattgcttgaacccaggaggctgaggctgcagtgagccatgattgtgccaccgcaccccagcttaggcaacagaagaatatcctgtataaaaaaagaaaaaaaaaaaaaagcacttcccatcatcttctggggcccatttctattcttgtaggctacaaacatatcccgtcacctcaaggctctctcagaactgaaaaggacactcccacttacctctgggaaacattttcttccttctgaacctaagagaagattaattataacctctgttctaccctcaggtccaagaaccacctaatagaggctgggcacggtggctcacgcctgtaatcctagcatttggggaggctgaggcgggtggatcacgaggtcaggagttcaagaccagcctggccaacgtggtgaaaacccatctctactaaaaatacaaaaattagccgtgcatagaggcaggcgcctatagtcccagctactcgggaggctgaggcaggagaactgcttgaactcaggaagcggaggttgcagtgagccgagatcgcaccactgtactccatccagcctgggcaacggagcaagactccatgtcaataaatacatacatacatgcatacatacatacatacatacatacataaatggggggacacaggagctagaaggtggagtgagaaaggtctctgtgggagtgtgagggtggggggcaggtgctgagccaggacacatagtactcactctggaacattccaggggggcccagatcctccagaccaaaactggaaaagctcagaggcctggataggacacaaagaaaaatggttggtcagtcccctgtggacagctgcagccccatccatccccctttgcccccacgtcccacaatccccaacctggaccacctgaggaccagtgggacccagtttggcctgcagagaaggcgcggagatgagctgggcagaggacatggttgccattgtctggaaagccttgtccttggaaacctggtcctggaggaggaggcggaagttcatgtgagaggggcatctcagtcaacatggcaagagggggatggtgccagggtggggtgaagacggggaggtgcagaggtggggagtcaaggcaaagggttagtggccgggcatggtggctcacgcctgtaatcccagcactctgggagccggaggcgggcagatcacttgaggtcaggagttcagtatcagcctggccaatatggtgaaaccctgtctctactaaaaatacaaaaactagccaggtgtggtggtgcacacgcataatcccagctactagggaagctagggcacaacaatcactggaacccaggaggcagaggttgcagtgagtggagatcgtgcccctgcatccagcttaggcgacagagcaagaccctgtctccaaaaagaaaaaaaaaggcaaaggcttgggttgggggagggttgaacctctccccacagccctctgcccctcctcagggacagggcactagtttggagtgagcgtgggtgggaggatgggcagaggaacttaccacgttcagagcctgcccgtgggggtgggggagggtgccaaaggaggaaagaaaacatgacttaggaagtacggcccggactcccccacctccctgccctacccgcccgcacagccccgccaccctgagctgagcagtgccaagggatggatgcgcaacaggaagtggaggtggccagccctggaggggaaaaggggctccctgcccagaaagacagtgatgggggtttctagaacaaggaaacccagaaggttcccagatgtccaggagacaggaaatgagaatttcagagccagcgggaagacaaggtaaatgtttcctaatccagacagaacagacagggaacacagaaggtcgagaacagaccggaagggaagggtttcagacctagagagaaagaaagggaaagctgctggatacaaaaaaaaaaaaaaaaaaaaaaaccagaagcgaccgtccccaagtccagaaaaagagacagaaaaacccccacacacccagaagggggagaaaatgagggtctccggccaacaggaaccaggaaatccaaaggatgaggagaaggaaatgaatgaggaatctccaccaggaaatgaagatttctgggcacaaagagtaggcaggtcatgcaaaggtcaggaaatgggaaaacaaaccagcggagatgaagaggaggccttcacagcacaagagggggaagatatgagaccgccaggaagagggaaaggagggacaggagcagagggaagggagggggacaggaacagtggtcaagggaggggaccgacggcccatccttcctgctgtcctgagcaaaaccttcagcctcctccatgccatcgctccctgcccagggtctcagcaaccgcaccaccatccctatgcatctccctttgtgggccactgactccccaccctggatgactgcaccccccgccctgaccacagaggtccctcacctgaggtctctgtccccctctgtctctgggtctctgtctccctctgtctctgggtctctgtccccctctgtctatgggtctctgtccctctctctctgggtctctgtcctcctctctttctgggtctctgtccctctctctctgggtcttggtcccctcccccaagtctctgtccccctctccctgggtctctgtccctttctctctgggtctcagtcctccccgctctaagtctctgtccccctctccctgggtctctgtccctctctttctgggtctcggtcccccacccccagtctctgtccccctctcaggatgtctgcattggtccctaccttcaacttggactggatttcccttgatttccttcgggccaaaacctggatgtgactagaaacctggaaggatcaacggagaagcagattcaggccacagccaccgcccctgtgttcactaccccttctctccctccaggtgcctcactgagctgctggaccatgaaaggtgaaaaacacactgaagatgagagccatctcgggagcacccgaacacagatgtccataaaggagctcgtgaacaccacggaccctcccgggacccatcccatccaggcctccttcccctccaccatgctctctctgtggctactctgggtctaacacaaccactagaaaaactatccccaaacaggcacagtgagagcacacgaacagacatgctgatacagttcggacattcgtcccttccaaatttcatattgaaatgccatctccagtgttggaggtgaggcctggtgggaggtattggatcatggaggtgaacccctcatgaatggctttgcaccatctccttgatgatgagtgacttctcactcagttcacacaagatctggttgtttaggccaggtgtggtggctcacgcctgtaatcccaacactttgggaggcctagatgggcagatcactggaggtcaggagttcaagaccagcctggccaacatggtgaaaccctgtctctactaaaaacacaaaaattagggctgggctcagtggctcagctgtaatcccagcactttgggaggccgaggcgggtggatcacctgaggtcaggagttcgagaccagcctgcccagcatggcgataccctacttctactaaacatacaaaaaattagccaggtgtggtggtgcgcgcctgtagtcccagctactcaggaggctgaagcaagagaatcgcttgaacccgggaggcggggcttccagtgagccaagatcacgccactgcactccagcctgggcaacagagcgagactccgtctcaaaaaaatatttaaaaaatgaaaaaataaaaatttgccagatgtggaggcgcatgcttgtaatcccagatacttggaaggctgaggcagcagaatcgcttgaacccggaaggcggaggctgcagtgagctgagatcacggcactgcactccagcttgggagacacagtgacttttctctcaaaaacaacaacaacaaaaagatctgggtgtttaaaaagagtctgggacctctgtctttcttctgttgctcccactttccatgtgccaggcctgctcccactaccccctccgccatgattggaggcttcctgaggcctcaccaggagcagatgccagctccatgcttcctggacagcctgcagaactgtgagccaaaataaagctcttttctttctttctttctttttttttttttttgaggtggagtctggctctgtcaccaggctggagtgcagtagcacgatcttggctcactgcaacctccgcctcccgggttcaagcgattttcgtgcctcagcctcccgagtagctgggattatgggcacacactgccactcccagctaatttttgtatttttagtagagacggggtttcaccatgttggtcaggatggtctcgatctcctgacctcctgatccgctcacctaaagtgctgggataacaggcatgagccactggcccagcctaaagctctttatcaattatccagccttgccaggcacagtagctcacgcctgtaatcccagcaatcccagcactttggggggctgaggtgagtggatcacctgaggtcaggagttcgagaccagcctggacaacatggtgaaaccccatctctactaaaaatacaaaattacccaggcatggtagtgcatgtctgtaatccctgctactcgggaggctgagacaggagaattgcttgaacccgggaggcagaggttgcagtgagccaagatcgcgccactgcactccggcctgggcaacagagctagactccatttcaaaaaataaacaaatacataaataacccagcctcgggtaattctttatagcaatacaaacggactaacacacatgccgagaagacagatgaacgcacaggaagcagcttcttccttgaacctgaacctgcccatgcgaggatgaccctaagaagaccggcccatcccagacagaagcccacaagtccattccgagacctgttttcgagttcgggtcttccccgttctcagcttgatgtagcgggcgatcagttcattccgacctgaagattcaaagacggaacagagttagttagactttcaacagaacttccccacagcatggacaccagggaagaagaaagcagcatgggtccccaaaggtctgcagcaagtgggctgccggtcccctcagctacgtggaagccagactgcttgggttcaaatcccagctccatcacgcactggctctgtgcgaccataagcaaatcacttaacctagctgtgcctcagtttcctcatctgtgcaaatggtgatgctagctcctacttcagagtgctccataaaccttggttactgtcattattcatcagtgggggccagggcaaaagacagaagtagactcaccatacatcttgccttcatcagacaaaattattttccggcggccgcagggtggatagatggccagggcctcctggaagctctgctcaatgtctgggctccacaccccctctgcatccgggcccccgtcacccccagccccctcactgccgccggtaccctcctcactgccttcctcactgcccgtccagccgctgccatcgtccagggcggccccagcccggggttcccccatctgggcctggaggaacacagaactcagcaagcttcccccaaaccccaccctcaagggacttgaagctgagagggctgggactctggaccactgggtctgagggaggaggggctggggacctggactcctgggtctgagggaagaggagctggggggtattcctgggtctgagggaggaggatctggggcctgaactcctgagtctgagggaggaggggctggggcccggactcctaggactgagggaggaggatctggggcctggactcctgggtctgagggagcgggggctggaggcctggactcctgggtgtgagggagaaggggctggggtctggactcctgagtctgagggaggagaaggagctggatttcttggaaagctgaggatgggagtgttctcagagtttccagaggaactcaattgtgatgaagtcacaatgattaccctagagtaatgccgagggccatgaaggctaaaggttcgggtatgaattacgggttttaaagaagacaggaggcaaaagttagtggtggggaaggaaggtgtgggtgaaacttcccctgtcccaccccaagaacaggtggtaagatgtgagcagcagctgccagaaaagaagaggggccaagcaagactgaggggaggtctagagagagggggacagagacccagagagggagggggacagagacccagagaggggatggggacagagaccagcaagggggggggacagagacccagagagagaaggggacagagaccagagagagagggggacagagaccagtgaggtggggatagagacccagagacagagggggacagagaccagagagagaaggggacagagacccagtgaagggggggacagagaccagtgacggaggggacagagacccagagagagagggggacagagaccagagggagggggggacagagaccagagggagggggggacagagaccagagagggggacagagacccagagagagggacagagacccaaaaagagagggagacagagacccagggagagggggagacagagaccagaaagagggggacagagaccgggggggggggacagggaccagagagaggggtccagaggcccagagagggagacagagacccagagagagagggtgacagagacccagagagagggggacagagacccagagagagagggacagagacccagagagagaggggaccagagacccagagagagggggacacagactcagagagagggggacagaggctcagagagagggcaacagagacccagagaaagggagacggagacctagaaagggcagggacagagactcagggcagcagctgaggccgagaccaggagagacccacagaaccacaagctgggggacaggggcgccctgccatcagaagagccagaacaaagggcccaggcgtcccctcccccagcttcccacaacccccatcaggggaggggcttgcctgtcagggcgactcccctccggcaccgggccccgcccctcccctcccccgtgcgccgtgggctctgatccaactcaagttcccagtgactttccggaggccgggaacagggaaaactttttccaatacagtcagatcccgcctccccggaggctccatgtcctccacagctttcccaggaccccagagtccaggcccctattcccctcctcccgccgaccatagcagacaaagaccccagccaagcccagtggcgctgcggcgttcaggacccccgtaggccaaaatcccagcccagcccttccccatgtggccagacaaagggacggtggagccgggtaagaaaggtccccctaatttcccgccccagaccctaaacctccaaagaggcaagacttaagatccagaaagccccgtaacctcccctcggccaccccagaggccctcccttctccgtaagaaggaccaaatgccccccagattacacaaggggtccttctcactccaaagtgacaccgccgcagacgcacgccccacaccccgccagcgcccttggcccgcacccgctcctgcgcgcacgcccaaactcagacccagccgcaggcaccctaactccggccagagttcccactcctcactgaggctcggtcacgggagcaaattcgggcccccgggcaaaaagagggctgcgaaccattcagagacggtcccgcaaacgcacgcctcacctcctaagaagcaactccccaccccaactcacacaccccaaagcaggatccccgactcccgccggcgccttcctacctcccggcctggggctggggagccgcgggcgggcggggcgctgcgagggagaaagttgccgggagctttgtttgggaaaagtgggagggaccggaggggggggcgggcccggccggcggacagcgggaagggggatccgacggtgacagtttggggaaggatttttgctttgggagagattagtctatctcggggctggtaggaactcaggatttgggtgcttgggaaaggagggggattgggggttcggactccaagtcggagggaaaaggctgataggagccagaaacccctgatctgagggaggagaggctgggggctgggactcctgggtctgggggctgggactcctgggtctgggagaggaagcggctggagagagatatgggctcctaggtctgagaggggacggggctaggcgcctggaatcccggctaccctcgtgtttgtgtattgggggtgcggaagtgatacgaatacaaagagtctttactgttaagccctgaggttttttttctttttttctgtttggtttttggtttttttgttttttgttttttttgtttttttttttttttgaggattggggtctggggatgggttttgactgattcctatgacgacctggtttccttgtgacctcaccacagttaagagtcgtgggcaggaccaccgggagtttattggaggcccacgtaggtgcagattcctcatctacaggcgctagtggactggagacggctggcggctgtcccgggacggggaagagagctttggtgcctgagggaagatggcttagggcccggtcccttaagggtgaaaggctgcgtgttcaaaattacgggactagagggggctggagtccggacctgaggtcctcagggaaaaggaagtctgattctgggttccttggaagatgaaatataagactggatttagggtttccggagacaacgggactttttagtggagcgggagcgggaaaaccagaagggacacggagaaaaggttccgaaacagatacacaattagagtgagagctaaaagggatgcttgtactccggtgtctccagtaggaggagcctaggactggaacttggggtgatgagggcaagatctgggacgcaggggcgtggtccagtgcaggggcgtggcccagtgcaggggcgtggctttcagccaaggggcgtggccattgcgattgggcgggactccgaaacgagggccgcaatcagagaacaccgccaggacttccaggacttggtctccaggactgaggtcaactgacgggggcgtggtctgactgtgtgggcgtggccagggaatgaactcacggctctggcttaaggggtgtggtgaacgaaggatggggcgtggctctgtcacgaagggcgtggtcatggagtagaggcccgggctcctgggtgaggccggcaagtttggagcgtggtcagacaataggggcgtggctacggctcgcggagcgcaaccaacgctctagaccagacctgggctcgagaccataactgtttggctttaacagtacgtgggcggccggaatccgggagtccggtgacccgggctgtggtctagcataaaggcggagcccagaagaaggggcggggtatgggagaaggtgaggattgagatctggtggtgaacgtgggcgaaagtgaggaaaagaccattggatgaggccgggtgctgtggcttacgcctgcaatcccaacactttgggaggcccaggtgggcggatcgcttgagatcaggagttcgagaccagcctgggcaatatgtcgaaaccctgtctctacaaaaaatacaaaaattagccgggcgtggaggcgcgcgcctgtggtcccagctacttcggggggctgaggtgggagaatcacctgagcccggggaggtcgaggctgcagtgagccgtgattgtgccactgtactccagcctggactacagagtctcggtctcaaaaaaaaaaaaaaaaaagcatatgagacagaacccagaagagccagacctgggagaagacggggcctggcaaggtggagggtgtgggagtagaagaaagaagcagtgggggaaatgagcgcggtgtgggagttgcctgaactggggaggcgacctgggcaaggtgctggagaggggcgtcttgggtgggggcgtggccactgtgcggggctctgaccccgacccttgccacagcctccccacctgcccccgcaaggcggcatctgctggtcctgctgctgctcctctctaccctggtgatcccctccgctgcagctcctatccatgatgctgacgcccaagagagctccttgggtctcacaggcctccagagcctactccaaggcttcagccgacttttcctgaaagtaagcgatggcggggggatgggggaagaagtactgagaagaggttcagggacacagagtgggagatggttcagggccaggcagggggacagacaggatgagagggcaacagggagaccaagagataggaagagggaagggactgggcccaggctataatcacagcactttgggaggctgaggcagaaggatcattggagcccagtacttggagaccagcctgggtaacatagtgagaccctcatctgtacaaaaaaatataaaaaatagttgcaggtacatgcgcctataatcccagctgcttgggaggctgaggcagaaggatcccttgagcccaggaggtcgaggctgcagtaagccatgatagcaccactgcactccagcctggatgacagaacaaggagaccctgtctctaaacaaataaatatatacgtgcataaataagagaggaaaggtaacaggcaaagagagaggagatgggacagagacaagagactggggaaagagacaggaggagagggggatggggacagaagaggaacagggatagtaaggcaatgggactgagaatagagagagaattcatgggggatggaggccggaggttaggccctaagtatcagagggcagaaagtaaaggggatgggagggacttggggcaaggcctcgggagcatcctagcagggctgcagaaggggctgtactgaggagatgtgaggtccagcagctcaccagtccctcctccggccccagggtaacctgcttcggggcatagacagcttattctctgcccccatggacttccggggcctccctgggaactaccacaaagaggagaaccaggagcaccagctggggaacaacaccctctccagccacctccagatcgacaaggtgcctatgcagggaagcccttcctgaagtccccttgggatccctccatcccgccatccctcgtgctgcagtatctgttgggagggaaggagggcggaggaggaaagcaggtttgctctcactctctcatcggatcctcacagaggaccgacaacaagacaggagaggtgctgatctccgagaatgtggtggcatccattcaaccagcggaggggagcttcgagggtgatttgaaggttaggacgtgccccgccgtcaaagtgtccaggcccaaacattttctttttttcttttttaaagaagagtctcactctgtcacccaggctggagtgcagtggcacgatcttggctcactgcaacctccgcctccgaagttcaggcaattctcctgtctcaagctccttggtagctgggattacaggcacccgccaccacgcccggctaattttttgtatttttttagtagagacagggtttctccatgttggtcaggctggtcttgaactcctgacctcaagtgatctgcccatcttggccttccaaagtgctgggattacaggcatgagccaccatgcctggtgaggccctaacattttctgtagtttaggaggacaagaagaggaactgaccctcctactcctctgtgtggaacttcctccttctgagcctcagttttgccatctctcaagtggggcaatccaactgtcagaaatgagatttttgacctcagaatacatctgcaagggtttagtagaccctagagggttttgtatcaaagtggttttctttttttttttaactacataatagtcaatcaaagtgtttctatgagcaccaaaatgttttataaaccaagaagggtttttaattctaagtgcttggaaagcttcaccctcataaaccccaaattgtgtttttgtctcaaagtaagtgctctgcaaacttcagagtatttttcaatctatcccaaagtggttggtaaacctctccattataaactccaaaatgtttttgttgttattgtggttttgatttttggggttttttttgtttgtttttttggtttttttttttgagaatggagtcttgctctgttatccaggctggagtacagtggcacaatctcagctcactgcaacctccaactcccagactcaaatgatcctcccacctcagcctccggaatagctggaactacaggcgcggaccaccacacccagctaatttttctatttttagtagagacggggtttcgccatgtttcccaggctggtctcgaactcctgagctcaggcaatccgcccgcctctgcctcccaaagtactaggattatagacatgagccaccacacctggcccaaaatgtgattttcttcttctttttttgttttttttgagatggagtttcgctctgttgcccaggctagagtgcaatggcacaatctcagctcactgcaacctccgccactgaggttcaagtgattctccagccctagcctcccaagtagatgggactacaagtacgtgccaccacgtccagctaatttttgaatttttagtgtagacagggtttcgccatgttggccatgttggccaggctggtctcgaactcctgacctcagctgatccacctgcctcggcctcccaaagtgctgggattataggcatgagctactgcgcctggcccaaaatgtgatttttaataccaaagagctgtatgaatgctaaatgcgttgtgtatttcacctttggtaaacttttttttttttttttttggagacgaagtctcgctcgtcccccaggctggagtgcaatggtgcgatctcagctcactgcaacctccatctcccaggttcaagtgattctcctgcctcagcctcctgtgtagctgggattacaggtgactgccaccacacctgactaatttttctatttttagagagacaaggtttcatcatgttggccagactgctcttgaactcctgacctcaggtgatccaactgccttggcctcccaaggtgctgggattataggcgtgagccaccatgcctggccaggccacctttggtaaacttctacaagtgattctaattatgaagtgctttgcaaaatcagggtatttttaatcctgaaaagttttaagaaacccaaagagcttgatacatccatatgatacccacgtacacccatgcaatatcttcattttaaaaatgtttatttaaaattttattttaaaaatttcaggacaggcacagtggcttacacctataatcctagcaatttgggaggctgaggcaggaggatgacttgagcccacgagtttgagatcaccctgggcaatagagggagtcttcatctctacaaaaaaatttaaaaagtaggccaggcatgctggcttacgcctgtaatcctagcaatttgggaggccaaggcaggcagattgcctgagctcaggagttcgagaccagcctgggcaacacggtgaaaccctgtctctactaaaatacgaaaaattagccgggcatggcagcctgcacctgtagtcccagctactctggaggctgaggtaaaagaattgtttgaacccgggaggcagaggttgcagtgagccaagatcatgtcactgcactccagcctgggggacagagtgagactctgtctccaaaaaaaaaaaaaaaatcaaaaaagtagccaggtgtggtggtgtgtgctgtggttccagctacccagaagcctgaggtgggaggattgtttgagacgaggaggttgagtctaaagtgggcccagatcatgccactgcactctagcctgggcaacagagtgagactctgtctcaaaaaataaataaataaataaataaataaaatttcaagactacagaaaagttttttttaaaaaacatactttattattttggaaatggagtctccctctgtcacccagactggagtgtagtggtgccatcttggctcacagcaacctccaccttctaggttgtggaaagtaaaaaagtttctctttaaagtttttattaaataataaatcacaagtgttagaaataatatttttaattaactttttttaagcctctttgctttgtgttagtaactcttttttaaaccatatcttatgtagttgttagatataaggaaataagtaccttctgtgtccttgtacgttaaccaagatatttggtctcgacgtgctcaagcatgtcccagctcacagcttatgccctttccttatttggaaatgttattacttctccaagtcttttggcaagcaacttcctcttttcctttgttctccattgcctttacctatttaagaaagttttttaagttgttagccaattgggtttagcttagactgtgaggtccagctccaaccaatggagacaggacacagcagtaaggacccaatgcataagggataaatattcctgcctttctttgttcattgtgctctcctggcaggattgctgatgggcagcaccctttctacagaaagtaaaattgccttgctgagaaaactttttgtctgaatgctaatttttccttgcgacaccaagaaacaagcattttgattctaacacaggttcaagtgattctcctgcctcagcctcccaaagagcagggataacaggcacgcactacaatatccagctaatttttttttgtttgttttttgttttttgtatttttagtagcgatgaggttttgctatgttggccaggctggtcttgaattcctgactttgggtgatccacccacctcggcctcccaaagtgctgggattacaggcaagagaagtttttcttaaaatagtacaacagattttaggctcttctgtatctgcccaccgagctactctgttcctggcttagagaaccaggagaaggggaaggggaatcacctgccacatgctggaggttggagcctgtggcaccatggcttgcctcactgcagttggtggtggcaacagaggctgcagtgtggccagagtggcttttctggctttgcccgcccagccactctgagaaaggctggaggagaaagtgaaggaggagtcacctgtggtgaggtggagtttggagcttgcagatggcacggctctgtggctcacctcctacagttgtggcggtgacagcgagggagacttcagcctgactggagtagaagggtgctcgtgaaggctagagtattgcctccaagatgcagcagtggatactcaggtttcaggagactccactgtccatggcgaatccatggtctgccagcgcagttttagagagagaatgtgccaccgcaggtgtcatcctcatgtgcaccctggcaggtagccatctgaagatttcaaggacaacctggcaggggagcagaccagcgacacttcctctgaacaggttcttgctgttcacttgacagactcagcaactcaggcaagtgttcacatggaagatatcctggaaggataccaagccagtgaaagctcagatgaaaatgccccatggctttggaaggccaatgaatgtgccaaggaaaaaggtgccatggaggatcctctggaagacctcgccaatgaaatttcagattaggacaccccactggatttgaaggccaaagaacgtgccaaggaaaaagttcccatggaggataccctggtggaagaccttggaaacgaaagctcagataaggatgcctcactggacttgaaggttgacaaacgcatgaaagaaaaagttcccacagaggataccctggtgaaagaccttgccaatgaaagctcagatgaggacgctctactggattgaaggctgatgaattcaccaaggaaaagttcccacggaggataccctggtggaagaccttgccaacaaaagctcagatggggatgttttgctaaatttaaaggctgacaaatgagccaaggaaaaagttcccatggaggataccctggtggaagacctcaccaacgaaagctcacatgaggatgctccactggatctgaatgccgacaaatgtgccaaggaaaaagttcccatagataatccagtgaaagaatttgccaacaacatcaaggaaaaggaggccccatgtaatgtgaaggcaccctagggagtccaggtaaatgatttcaaggatgacctggcggggatggtgatcagtgaaaagtccccagaagcagccctatctcttcacagggcaaaatgagatgccaagaaaaaagattgcttcgccattcttgtagcagagcttcctgaagagatgtcctcagggcaagtgctggccgttgtcaccgtgaaaggcatcaagaaaaatggtggctctgaggacagcttttctaaaaccagtaatgacaaagactcttcctgtagtggagacactcaagcttctggagcagatatggaagagtccaatcatgcagatgaccatcagcatatgccaacaagtactctcccagcacctgcagaaaaaacaatagagacaaagcctgaaaaggcagaagaaatgtaacccagtgagttcaaggaggatgaggatgctgaagagcctgacctgacctgttgtgacctttgttttttatgctagaagtccctacagattttttgaacacctggaagggccgggtcacaagacctcaccctggcccagcaaccatctggaccgtgagagttttggggattttgctactctctctggacttttacattctcttaattttttaaaaaatattctttctttaacctgttttaagatgcaagctgtcattgcgtcatcatagttacattttattactcaaataatttttcaattgttttactagttttttttggatctttgtccactggttttagagtttttgtaattttgataaatgatcttttatgctttgtatcattttcttaatgacttaccttagtttttaacaaatccatggtacagtaagttatattaagacatagtatttttatgtttttttaaattatactttgggttctggggtacatgtgcagacatgcagttttgttgcataggtgcatgtaccatggtggtttgctgtacccatcagcccgtcacctgcattgggtgtttctcctgatgctatccctcccctgaccccccaccccccaccgacaggtcctggtgtgtgatgtttcccttcctgtgtccatgtgttctcattgttcagctcccacttgagtgataacatgcagtattttgttttctactcttgtgttggtttgctgagaatgatggtttccagcttcatccatgtccctgcaaaggacattaactcatccttttctgtggccgaatagtattccatggtgtatatgtgccatgttttctttatctagtctatcactgatggacaattgggttggttccaattctttgctattgtgaatagtgccataataaacatgcatgtgcctgtgtctttatggtaaaaaaaaatagtataataaatatccctatagtctcttttccataaaccaaaatttcttaaggttggcatcattggcatgtggggctggataatctttattgtgggagctgccctgtgcactgtaggatatttgataacatccctgggctctatccactagagagaagttgcctcctgccaggcacagtggctcatacccgtagtcccagcactttgggaggcagagacgggcggatcatgaggtcaggagttcgagaccagcctggctaacgtagcgaaaccccgtctactaaaaatacaaaatatggggccaggcacagtggctcacacctgtaatcccagcactttgggagaccgaggcaggcagatcatgagatcaggatatcaagaccatcctggctaatgcggtgaaatcccgtctctagtaaaaatacaaaaaaattagccaggcatggtggcaggcgcctgtagtcccagctactcagaaggctgaggcaggagaatggcgtgaacccgggaggtggagcttgcagtgagccgagatcgtgccactgcactccagcctgggcgacagagcgagactccgtctcaaaaaaaaaaaaaaaatacaaagtatggccaggagtggtggcttacacctataatcccagcactttgggaggccgaggcgggcagatcacctgaggtcaggagttcgagaccaccctgaccaacatggagaaaccccgtctctactaaaaatacaaaattagccgggcatggtggcacatgtctgtaatcccagctactcaggaggctgaagcaggaaaatcgtttgaacccagaaggtggaggtcgcggtgagcgaagatagcaccattgcactacagcctgggcaacaagagcgaaactccatctcaaaaaataaataaataaataggctgggcatggtggctcacgcctgtaatcccagcactttgggaggccaaggcaggtggatcacctgaggtcaggaggttgagaccaacctggccaacatggtgaaaccccgtctctactaaaaatgcaaaaattagctggcatggtgccatgcccctgtaatcccagctactctggaggctgtggtgggagaatcgcttgaacccaggaggcagaggctgcagtgagccgagattgtgccactgcactccagcctgggctacagagtgagactccatctcaaaaaaaaaaaaaaaagaacacagtcatgttggattagggcccaacctaatgacctcatcttcaccaattatatcttcaatgaccctagttccaaataaggccacattctgaggtattacaggttagaatttcaaaatatgaatttggggaggaaacaatatggttgtttgttcgtttgttttttaagcctgggtcttgctctgttgcccaggctagagtgcaatggcacaatcttgactcactgcagcctctgcctcccaggttcaagtgattctcctgccttagcctcccaagtagctgggattacatgagcgcgccagcacgcccagctaattttcatatttttagtagagacaggattttgtcatgctgtccaggatggtctcaaactcctgacctcaagtgatctgcccacctcagcctcgcaaagtgctggattacacacatgagccaccgcgtccagccaggaggaaacaatttaacacataacaatctcctgcgcggcttctcagacctcatcttactaaaaggcagactgattcagcaggtctgagtggggtgggacctattaatttgcatacctaacaacagcagcccaccctttgaattgcaaggaccaaacagacactcagtccatattcaaactttctccctcaactcaaagctgtccttgaaagctttattttttttttttcccttgagatggagtctcgctctgtcacccaggctggagtgcagtggtgcgatctcggctcactgcaagctccgcctcctgggttcatgccaatctcctgcctcagcctcccgagtagctgggactacaggcgcccgcaaccatgcccggctaaatttttttgtatttttagtagagacagggtttcaccgtgttagccaggatggtctcgatctcctgacctcgtgatccgccagcctcggcctcccacagtgctgggattacaggcatgagccactgcacctggccccttgaaagcttttgattcaggatcaatgaaggatcacacattgcatttatggtcatgagtcttcggtaaacccaagagcttttagtcctaaagtgctttgtacatttcaaactgctatcctctaaacctcagagaggatttaatcctaaagtgctctagaatcccaacaggcattataatccctgaagtgctctattacctcccttttgaaagcccccaaacaaattttccaatcccaaagcattctgtaaacctcagagtatttttaatccttaagtgtaaacccaagtgctttgtaaacctcaaacagggcttttgaacccacaaagcatcctgtcatctgcaaagtgggctgaataggtcagtggggactgaccatcctggggtgctgtttggagtatgagagggtctccttgttcttcctccccaggtacccaggatggaggagaaggaggccctggtacccatccagaaggccacggacagcttccacacagaactccatccccgggtggccttctggatcattaagctgccacggcggaggtcccaccaggatgccctggagggcggccactggctcagcgagaagcgacaccgcctgcaggccatccgggatggactccgcaaggggacccacaaggacgtcctagaagaggggaccgagagctcctcccactccaggctgtccccccgaaagacccacttactgtacatcctcaggccctctcggcagctgtaggggtggggaccggggagcacctgcctgtagcccccatcagaccctgccccaagcaccatatggaaataaagttctttcttacatctaacaacaccatctcctttcactatttatccccaaccgcctgccaaccaggccatggcaaaggcccccagtcccagctctgagcatgagagctggctgtgctagctcttgcctaagtctcccaggcttggttttctcattcaggcattgtctgtgctgtagccccatctgtccactcagcacccaaccctgtcacctccagccctgtctgcactcccaactctcagctatttttttttgctttttttttttttttgagaacagggtcccactctgttacccaggctggagtgcagtggcacaatcacagctcactgcagccttgacctcccaggctcaggtgatcctctcacctcagcctccccagtagctgggaccacaggtgtgcgccaccacgcccagctaattgttgtattatttaacatagggatctccctgtgttgctcagggtggtcttgaactcctgggctcaagcgatcctcccacctcagcctctcaaagtgctgggattacaggcttgagccactgtgcccggcccccaactctttcactccagtcctctctacttggcccccgtactgttactgccataaaaatgggcacaaacttggcaacttaaaacaacacaaatgcattatttcacatatcatcctggtcagaaatccaggatggctccgctggccctcagctctgggtttcacagggtgtcagccacccgagctctcattgggaggctctgggaagaagctgctttcaagctcattcagattttaagcagaatcgagttcctgggcttgtgggactgaggtccccacgttcttgctggctgtcagctgggggccacccatgcttccacgcttagctccaagaggcctctctccagttactgcaggtggacctgacatcccagagccacagcccagtatcatggcgggactctgacttccccttgtgtcccatctctggtatgccttcctcttctggcagagacagtcctctgctttgaagggctcatgtgattggactggacctaccgggacaacatatttacagttttcaggaattatggggtgatcatctttgggggaccactatccagccccactcaggtccttcccatgtcatctccagcctcgactctgtggtgtccacacccacctatccttgtcttcatcttctcattctctcactaccccctgacggagagactccatctccaacttgctatttctctctctttgtccctctatctgaccctccctgctcaccacctcaaactccctcacttccaggcctgatgccacgtccaaacttggaagctcacagagcttgcctgtggtggtctgtccactttgtccttcctcagagcatttcctgtcccctctgagaatcctccgtcatgacccatcaaggagaaagctgatctgatcctccccagtgctgagtcccatctaggacccggacacggcatgtactctctcccttgaagcccaagctgagcgctggatcaccccatagactcacacactcaggaacccaacagtgagtacaatgaatacaagtcaacttttttttttttttttgagaccgtctcgctctgtcgtccaggctggagtgcagtggcatgatctcagctcactgcagtctctgccaccacccaagttcaagtgattctcatgcctcagcctcccaagtagctgggactacaggtgctcaccaccacgcccagctaatttttgtatttttaatagagatggggttttaccattttggccaggctagtttcaaactcccaacctcgggtgatctgcccgcctcagcctctcaaagtgctgggattacaggcatgagccaccacgcccggccaagtttggctgcttctaaggcctctctccttggcttgaggatggctgctttctcactgtatcctcacattgtgtctttttgttttttttgtttttgagacagagtctcacactctgtcgcccaggctggatggagtgcagtggcgtgatctccaccttccaagttcaagagattcttctgtctcagcctcccaagtagctgggactacatgcacgcgctgtcatgcctggctaatttttgtattttttagtagcgacagggtttcaccatattggccaggctggtcttgaactcctaacctcgtgatccacccacctcggcctcccaaagtgctgggatgacaggcgtgagccactgcacccggcccacattggcttttatttgcaattctagaatagggcagtacctcattctataaagtaaaatgagtgttcccatgagccgagcagagaagggttgtttacgatctcggctcactgcaatctctacctcccgggttcaagcgattctcctgcctcagcctcccgagtagctgggattaaaggctcctgctgccacacccagctaatttttgtattttttgtagagacggggtttcaccatgttggccaggtggtcttgaactactgacctcaagtgatccgcctacctcagcctcccaaagttctgggattacaggcgtgagccaccgcacccagctaatttttgtatttttagtagtgacagggtttcatcatgttgggcaggctggtctcaaactcctgacctcaagtgatgcacccacctcagcctcccaaagtgctgggattacaggcgtgagctactgtgcccggccagggattacatttctttttttttttttttaattttttattacagaacaattattatctgtcatcaaactatcctttcagattcattttgaatacctcctttcttttttatttttctttgagatgggagtctcgctccgtcgcccaggttggagtgcagtggcgccacctcggctcactgcaatctttgcctcccgggttcaagtgattctcctgcctcagcctcctgactcactgggactacaggtgcctgccaccatgcccggctaattttttgtatttttagtagagacaaggtttcaccatgttagccaggatggtctccatctcctgatctcgtgatccgcccacctcggcctcccaaagtgctgggattacaggcatgaaccactgtgcccggcctcaattggtcatttcaaagttactttacttgtggccaggtgtggtggctcacgcctgtaccccagcactttagaaggctgacgcaggtggatcacctgaggtcaggtgttcaagactagcctggccaacacagtgaaaccacgtctctactaaaaatataaaaaattagccgggcatggcggtgggtgcctgtaatcccagctactcgggaggctgaggcagaagaattgcttgaacccaggaggcgaaggttgcagtgagccgagatcacaccactgcactccagcctgggcgacagagcaagactccgtctctaaaaacaaacaaaaaaacaaacaaagttactttacttgtaaaggttaaaacagaggggacttcctcatcatgctagctagaagatgtggctattatctctctctcctgtctcccctaaattctcagaggtcatataacttagtttcagcttgctgacatggaactgtaacatgagtgactccactggtctcttgggcctagtgcaggagctcggtccaaaccaatggcttcctgtaaaatttatttaacaaggcaaatctacagagacagaaagcagattcatggttatgtggggcttcacggaaaggaaggttgagttaggaataatggctaagagatgtagggctttgttttggagtgatgaaaatgttctaaaattaattgtgatgattgtagaactctgtgagtacactgaaaaccactgaattatacactttaaatgggtaaattatgtggtgtgtggatgataactcaataaagctgttaaaacaattagttaattaataattctattaaacagtttaccctgaacaactcagggcttaggggactaaccccctgtgaggtaaaaaatctgaagatcaattttgactccccaaaaacttaatgactaatagcatgctattgaccagaagctttacataaacagtagatgaacacatatattttatgatatatgtttttggggattttttttttttttgatacaggatcttgccctgtcacccagggtggagtgcagtggcacaatcatagctcactccaggctcgacccccctggttcaagcgatcccccctcctcagcctcccaggtaggcaggaccacagataaggctctcacaaccacacctggctaatttttgtatttttagtagagatgagggtttcaccatgttacccaggggtgtctccaattcctaggctcaagcgatcagcccaccttggcctcccaaagttctgggtttacaggcgtgagccaccatgcctggctgtgttatatgtattatatactatattcaaacaataaagtgagctagagaaaagaaaatgttattaaggaaatcagaggaagttaggagagggttaaaaaaaataaaatcgccgggcacggtggctcatgcctgtaaccccagcacttttagaggctgaggcgggaggaccacctgaggtcaggactttgagaccagcctgaccaacatagtgaaaccccatctccactaaaaatacaaaagttagctgggcatggtggtgcatgcctgtaatcccagctacgtgggattgttcaaggatgaactgtataagtcacaatggatctgcttctctgagcaaaccctaaaggataaagcattattcagcttgttgcagtctgccaatctaaaaagggtagtttcctgttgctttaattggaatgtttctggttactgatcttttgagctccttatcacatatttgttagttttttggatttccccttctgtaaattgcctgcttttctgtaaattcttggtcatttttttctgttgggttgttatctttttctttttgatttgtaggagttccttcaatcacctaccttttaatcccttgtcaattttatttttttattttatttattaattttttttgagacggagtctcactctgtcgcccaggctggagtgtagtggtgcgatctcagctcaccacaacctccacctcccagattcaagctattctcctgcctcagcatcccaagtagttgggattataggcatgctccatcacatctggctaatttttgtatttttagtacaaaaatacaaaatctcttggccaggccggtctcaaactcctgacctcaggtgatctgcctgccttggcctcccaaagtgctgggattacaggcatgagccaccacgcccagcccctggtcaattttagacaatgcaaatatcttccgctcgtccatcatctcatctctcatgatcttggcccttgggatccttgatgaatagaaacccttaatactgatgtaatcaaattaatttttttgacttatgattcatccttttgagatccctaaaagaagtcattaatactttcctacattttcttttattaactttatagttttaccttttgcatttagtgctttactagcagctggtctccactttacattattatgttatagaggaggaggggcctgaaagcctctcagtgctcaagatctttgaagacttaactgggcattagctcaattagagaggaagaaagcagtagaggatggggatggaccactatctcctgggcctcgcttcccccaagaaaatccatggacccacccacaaccactacatctcagactatttcagcatcttcctcccagtggcttcacacacctgggtgagacccccaacatctactcagttaccaggtctggtattccctgatatcatcctgattttttgactggaaaaaaagtgttaattcataagactttgggtttttttgggggggcaggggcaggcgatggagtctcactttgtcacccaggctggagtgtagtggtgtgatctcagctcactgcaacctctgcctcctgggctcaggtgatcctcccacctcagcctcctgagtagctgggaccacaagcatatgccaccatgcccggttaatttttataaattttttttgtagaaaggtggtttctccatgttacccaggctgatcttgagctcctgggctcaagcgatctgcctgcctcagcttcccaaagtcctgggattacaggcatgaaccaatgtgcccagacccccaacactattctaagcagtggggattaagcagtgaataaacaatgccccagcatcatgggatttggtgggggagagaaacaataaatatgtatcaagcaatggcaaatgctgtgaagaataaagcaacatgaggcagaaaggaaactctgaggggaccgagctcatcttagatagggtagtctctctgatatatacacagagggaggcactctgatatatacacagagactgaactggggtaatggagcaaatccggtccatggtaaatctggagaaagagactttcaggctgagggaatagcaagtgcaaaggtcctgaggttggaaatggcttggcttgatcaaaaacaaggaggccaaggtggacagagcagttattgatggagataaataggggataagatcacaaaagtagacgtagggtacaggagagcagaccatgcagggtctttggagcgtagtgaggagtttttatgttattctatttaaaatgggaagtgagctaagtgttacaattaaagaagtaacatatatgtatttactgatcaaaaagattatccggacttttgcttgtcactatgatggagtagctagtagctgactaactccccaccaaaaactataaaagctgaatacaagctaggcatgatggttcacacctgtaatcccaacactttggaaggctgaggcaggtggatcacctgaggtcaggagttcaagaccagtctggccaatatggtgaaaccttgtctctactaaaaatacaaaaattagttgggcatggtggcaggcacctgtaatcccagctactcgggagactgaggcataagagtcatttgaacacgggagatggggtttcaccatattagcaaggctgatcttgaactcctgaccttgtaatccacccgtcttggcctcccaaagtgctgggattacaggcatgagccatcgcgcccagccaaggaaattaaattctttccgagggaagataataccatccagtttttatattttaatttaaaaattaccagtcttgccaggaaacaagaccaaatgacagaaaaccaagagaaaaaacatacactagaagtatgtacccaaaggtgatccaggtattacagttctcagatacaggctttcaaataactataattaatatgttccccaaaaatagatgaaaagatggataatttcatcagagaactggaatctaaggaggagggagaatccaatataaattctagagctgaaaaataaattaattgaaataaaaattcagtagattagtcccacatcaggttagacacactggaaaacagatcaatagaaaatatctagattaaattacacagaaatagggtagaaaatacattaaaaacatatgagacatataggtcatggttaaaaggtctaatacatacatactggagtcctagaagagaggaaaaagacaatgaggaggaagcaatactaaagaactcctgggcaagaattttaaaaaactgatgaaagacatcaactcacagatccaaggtgggaggatcgcttgagcctgggaggtggaggttgcagtcagtcaagaatgtgccactgtactccagcctgcgtaacagagtgagaccctgtttccaaaaataaggcagaacgttgataattgctaaagctatgtgttaggtatatacgggttcgttatgtttactttatgtatgtttgagatttttttaatactgtataaagatatttttaagtaactgacactaaatactccaaataaaaggcacagattttctgatctacaactacatgcaacatggttgaatcttatatgacatttaacaaaagaaccagaaacaaaaatgtttctgtatggttttatttattctgaataaaaaaacaaataaagcttatctatgccattagaaattggggtaggccgggcacagtggctcatgcgtgtaatcccagcactttttgggaggctgaggtgggcagatcacctgaggtcaggagttcgagagcagcctggccaacatggtgaaacctcatctctactaaaaatacaaaaattagccagatacggtggcacatggctgtaatcccagctactcagaggctgaggcacgagaatcacttgaacccaggaggcggagtttgcagtaagacaagattgcgccactgcactccagcctgggccacagaaggagactttgtctcaaaaaaaaaaaaaaaaaaagaaagaaaaagaaaagaaattagggtaaaagttacccctaggagagtagggactggaaggagccatgaggaagaatcttggaggcaggtagtatgttgtatcttgatctcggtttagataacacagatgtgttcaatttctgaaaattcataaagcttatcacttatgatctatggactgttctatataaatattacacttcactaagagttttggtaaagtcaaaaatcagcagtcagcataaaacaaaacccaactatatgctgttacaagagacatgccttaaatataagcacacaaaaagatggaaagttacaggatgaaaaagataccctatataaacactaaccaaagaaagctggagaaatctctacatcaaagtagccattaaggcaaaaagcattgctagaagtaaaaaatgacatttcaaggtaataaaggggtcaagtcaccaggaggatataaccattctaaatctgtatgcatttaataatacagcttcaacatatataaagcaaaaatgacagaactgagagatggaaaaatccacagtcattcagtacaagaagcaaacagtgaagatattaaagatttgaacagcatgattgacaaacttgacctgacatagctgacctgcaggatacacactctgttcttttcttttttttttcttttttttttttttttgaaacagagtttcactcttgttgcccatgctggagtccagtggcacaatctcggctcattgcaacctctgcctcccaggttcaagcaattctcctgcctcagcctcctgagtagctgggaagacaggcgtgtaccaccatgcctgactaatttttttttatttttagtagagatggggtttcaccatgttggccaggaatggtctcaaactcccaacctcaggtgatccgcctgcctcagcctcccaaagtgctgggattacaggcgtgagccaccacacctggccttttttttttctttttttttttttgagatgaagtctcgctctgtctggcccaggctgtagtgcagtggcgcgatctcagctcactgtaccctccacctcctgggttcaagcaattctcctgcctcagcctcctgagtagctgggattacaggcacatgccaccacatctggctaattttgtatttttagtataaacgggctttcaccatgttggccaggctggtcttgaactcctgacctcaggtgatccacccaacttggccttccaaagtgctgggattacaggtatgagccaccacgccaagctactcttttcaaatacacatgaagcatttgctaaaatagatgaaatcgtggactataaagcaaatctcaacaaatgtcaaagaaatgaaatcatatagagtatgtttgtatgttttctgactacagtgaattaagtaggaagcaataataaaaagatagcagggggccgggcgcagtggctcacgcctgtaatctcagcactttgggaggctgaggcagaggaatcacaaggtcaagagatcgagatcatcctggccaacatggtgaaaccc

SEQ ID NO: 11 - DNA, 1216 bp, Homo sapiens
agggccgcaatcagagaacaccgccaggacttccaggacttggtctccaggactgaggtcaactgacgggggcgtggtctgactgtgtgggcgtggccagggaatgaactcacggctctggcttaaggggtgtggtgaacgaaggatggggcgtggctctgtcacgaagggcgtggtcatggagtagaggcccgggctcctgggtgaggccggcaagtttggagcgtggtcagacaataggggcgtggctacggctcgcggagcgcaaccaacgctctagaccagacctgggctcgagaccataactgtttggctttaacagtacgtgggcggccggaatccgggagtccggtgacccgggctgtggtctagcataaaggcggagcccagaagaaggggcggggtatgggagaagcctccccacctgcccccgcaaggcggcatctgctggtcctgctgctgctcctctctaccctggtgatcccctccgctgcagctcctatccatgatgctgacgcccaagagagctccttgggtctcacaggcctccagagcctactccaaggcttcagccgacttttcctgaaaggtaacctgcttcggggcatagacagcttattctctgcccccatggacttccggggcctccctgggaactaccacaaagaggagaaccaggagcaccagctggggaacaacaccctctccagccacctccagatcgacaagaggaccgacaacaagacaggagaggtgctgatctccgagaatgtggtggcatccattcaaccagcggaggggagcttcgagggtgatttgaaggtacccaggatggaggagaaggaggccctggtacccatccagaaggccacggacagcttccacacagaactccatccccgggtggccttctggatcattaagctgccacggcggaggtcccaccaggatgccctggagggcggccactggctcagcgagaagcgacaccgcctgcaggccatccgggatggactccgcaaggggacccacaaggacgtcctagaagaggggaccgagagctcctcccactccaggctgtccccccgaaagacccacttactgtacatcctcaggccctctcggcagctgtaggggtggggaccggggagcacctgcctgtagcccccatcagaccctgccccaagcaccatatggaaataaagttctttcttac

SEQ ID NO: 12 - protein, 240 aa, Homo sapiens
MGEDPAPARRHLLVLLLLLSTLVIPSAAAPIHDADAQESSLGLTGLQSLLQGFSRLFLKGNLLRGIDSLFSAPMDFRGLPGNYHKEENQEHQLGNNTLSSHLQIDKRTDNKTGEVLISENVVASIQPAEGSFEGDLKVPRMEEKEALVPIQKATDSFHTELHPRVAFWIIKLPRRRSHQDALEGGHWLSEKRHRLQAIRDGLRKGTHKDVLEEGTESSSHSRLSPRKTHLLYILRPSRQL

SEQ ID NO: 13 - DNA, 28446 bp, Mus musculus
  misc_feature (1)...(28446): n = A,T,C or G
tggatgcttctttccaaaccattcatttttatagctcagaagagtcatactttggtaagatggatgattattttgtatcttctagtaacatgtaaagcaccttctagaactataaagattatcctgtaaggatgaagcttccaagtgagtaccatcttgattttttcatgttctatcactcaagtacattatctcttcagcaatagggtcttactttaaagttctggggggtaattaatgtagcattggtattacaatatagcaataacattattctataatctttgattggagtctatgtgttctcaattgttagcaactccaaaaaagggtatagctattcctggcacggttttttgttgttgttttgtttttgttgttgtcgtctccttttgttagtttctggtatctcatagggggcactgtcatcctgtcaaaaaggggctccatcataactttgcatgtgtaatcttttatagtggtagatagcttcccatgtgacctttccgaagatctttagtgttattcatgcctccctctcccttcttctaaactgttaagtcacctcaaccccaattttaccttttttgttccatttatccctccaaacctttatattatttttcctttccttgaataaccacaaatgctggcttggatgaggggggtgggaaacacttattcactactaatggagtacaaattggtgcagccactctgaaaatcagtgtagaaggtccctaaaagtctgaaaatagatctatcacctgtttcaccattgctttactgtaataaccagtaaacggaaatagcctagatgtccatccattaatgaataaataatgaaaatgtgacatatttacacaatggattactatttagctgctaagaaaaggaaaattatgaaattcacaggtaagtgaatgaaggtggatgctgagaccaattcctgaaagacaaacatcacatctatcacttgtggatctttgaagtttcagatacttgcattggatttgtaataaatacccatggaggtcaaattattgctaaggaacagtggtgatagtgtggggcttccaggaatggaagatagaaggtagtggtgcttaatgaattttttaatgagtgtctatacaaacattaggtactttgcacaatgtcaaccttctctcagaatttatcaagtagatgttcctgtaccacaaatagacaaccttagcttcaaaatgagcaagcaacatatgccaaaataaataatcagattttaactatcttgacacaggtaatttgttttacccatctttttgtgtttgctggctagcaaggataaggtgttgaataacctgatttttaaataaacacttggattaagagataaatgtcagtaatttagctagaaaaaaaaaagaagagagacctggaattccaaaccagactgtgatctgagaggctgtacccaccactctgttggcctcctctgggaagtgtgcagggctcctttccaaatgaggctccaatgcagggagtgcatatcaagggttgcaaagcatcttgctcagaaaggtgcatctactcttctgtttcaccagtggtttcacgaatctaggagaaatagccactgatttttctctctcagaactttaggtgtgacacataaagccatgtatttttgtttaatggtatgctttctatttgcacatcttcttgtgcctattaaaacaccgcaaatctctgcctgctgtttgcttatgctaaggcttcggccatcagatatgctacttcagcatgctatgtggcatgaagatccaagtttattcacaatataacaaagtagagtttgttttttcgtacagactgaagtttgtttcgttcaagaatgtgagttggtagttatggcttcacacccatgcagggtcagtaccattaaatgatcacattttctgtttatgttgacttctaattatttctcccattaaaaaaaaaatggaaaggttctgttagccaagccagagcacataatgattcccactgttggatgaacactgttggacctgtctcctgaaaaaaaaaaaaaacgctgttatttaccacccacaaactcatcaacagtcctggctctctgcaggatctggattctcagccctctccaacccctcttgtcctctgttcacctccattgggaacatggccacttggagaaagggaaccttcccctcccttagaaacagctgggaatgctgactcagtaccatacattttaacccagagcagagcgtgctcactttgtagtagagtttctatttgtggttaaggaaaagtcccttcacttttgatccttcagatgcctttgatacagtttcagcatcatactaaaccagcagatcagactggctgggcacaaggcaattaatatgattattcctactaatcacatagactttgaaatccacccatggattattaatcttttaatgaataaaataacatatggtggagattcttatgtaagtcttattagaattgaaagccacagtgttagtggcctgaattactagtcatttcaatttgcattactaatgggacgatttagaaaatgcaagaaaggactatatgtaagacttttattaagtttttattctttaatgacctcttgtatgtttcacaactttccttttctctttctctatcacaagccccagatatactccactaaaagaggaatgaatatttaaaagccccaagcaaattaaaattactgctggtgggagatagaagggaacagaggggaaatggaatgttcttatatttaaaaaaaaaaaaaaaaggagacatatacacaggctcttaaagggttggaatttaaatgcaaatccccaagtttgtgcctagttacatttcctctaatataaaaattaataaaagaacatattttcttgtccagatccataagattaagaaaatgaaagagatggcactatcagaccaaatgtttacaaatgtttacgaagtacagtctacatgcatttgatctgtgacatcagtcatttaaggcaggtctttggggtctgagcccaccctcttctgacacaccacctgtcagtcacagtgctggagcctcctaggttcctttcacgctgttccttgtagccagttcctactcactgctgtcatctctgcacttggtagacacttcctcggttgttcaaggatggtttccagggtttctccttaccatccaggcttcaaacaaagaataacttcaaaatgtctgatctcatcaccatgtttacagtagcacctctaagtgattctatgtgtattcacctgagaccaggacaatgtgtatttatctaactctctattatataactaccagcaggttaacatagtgacacaaagagctaaagaacctttacccatgtatcctctgtatcatacaacacaaggagttcttacttttctttaactaaaacattaatttatagcctttttgctgcatcgatgtataatgtttccattcatctccaagcttacttctaactagcaagtatttctatcttgatcctgctatcatggtgtaggggtgtaaaacagtgttgaggctggaaagataaattggtagttaagagaggccattcaaacatgacaaccagacttcagattccagagtcaatgaagatgctgagtggatgttgtatctgcctgcaattagaagaccagttctcaacaagtaggtggtgaccgtctgagggcactgaaggactctttcataggggtcacctaagaccatcagaaaacacaaatatttacattaggattcattaacagtagcaaaatcacagttatgaagtaacaaggaaaataattttatgcttgagcagtgggggtggaccacaacatgaggaactgtattaaagactagcagcattgggaaggttaagaaccactaccccggtgcccttgactgcagagacagaagatccctaatgacagctggccagtgaaaccaaatctgggaactccaaatttgattgagggatcctatctcattgaataaggtgaaagcaactaacatgagattccccataccaactgcaggtctccatatgtacacccccccccccaacacacacacacaaactcacaccacatacataaagaggaaaaatagcattgttatatttcattaaattactgtacatattaaaataagcttttgtgcctactttgacacctatgcttaattcctccaaattgtttaaaaggctgtaaagtttcaaccatggtcagatttaagctttgactaatgaatgagaatttaaaaattctcaatattttcttttgtgttcaccaaaaaatgtgtaagagactatccagtaattctattttttaacacttgatcttcaaggaactgtgaatcaatcatccctaaattttcagttaccataatgtcactgtataataacacaaggagacctgctgccacagtcttttggggacttgattgtgtagaaatacatttccttacttagtcaagattaaacaaaaaacttctagataaagagactactaaaagacatctagaaaaaccttttttgtttagctttctgttaaatatcagtttaacacttgcattaaaaaacacaattacacagcctttttatattatgggtgtcattcattcttcaatcatactgattattaaaaatcaatgcaataaatggtcactctgtatagatgccagaaattatcaaagagactaccaagaaattatcagaccaaataaactccttaaattgaggaacattaagtgtgaacaagtgcaaaaagggagagaaatctgaagtgaatatgaagtcttttctccttctcctttctctaaggcccctgccagggttagggctatgtttttgtttgcttgtttctttatttttttggctaaagtgatatttaccaaatttgtgaattcattacatattaattatataaattgtaaaattacaaaattgctcatatataatgagcacttacattgaatccaatcaagtctgttttatgaactcacaagtaaatgaggagagtagataattgacaaaacacaataggttactttcacatagtttaagtagatgagagttagacttccagttgaacattagaaatggaataaaggcagatccctgaagcttgctgtgaattttcacacaagagttcttcatactcagttgatttgatgcataataaacaccgcgagtcacaggctgaactttctcagctagatagtcagaaaacttggtcagatatcactcaagaacacttggcatcagacactggagacagtttttaaatgatgcattaatctactatttccacacagttttcataagattaccatcttataggataataggagggcttacagaggaaagggaagggagaaattttataattatattataatctcaaaaaattttaagttcaaaacaaaacaaaataaaataaaaaacgttttaaaatagttattacaatgtatctctttcttatttataacttaagtagtactaattttgcatgaatgtcaaaagatcccaatttgaattcctgtaaattgtttccattttctcactctcatctagccccctttatattagcatttacctccagagagagttagcaggaacaaagatatatatttcaatccctgatctcagctattctttgctccctaattttcagttttcttcacacctagcttagaaattaaaaaatgaatgatcatgataacatgtacttgtagaggaattttccactaattaattggttggctaataaagacaacaagaagccaatcgctgggtgaataggagaggtgggccttctgggtcagagagaggaagaaatggccattttttacagtgaggtaggaatgagaccaggaactgtttgacctggtggcgacctctgccaccggaagatttccaacatagaatagttgagtttaggataatagattccgtgcccagtggttgtgtcatctgttgattttaaattaagattgtttggtgttttccattcacgggtgactcgggtgggccagagggaaagagcatagcaggggcataattccgccaggctttggaacaggaagattcggctaaggactgaaaacgagcggagaggtaaccaaagcagagtgcaggctggtgacagcgttcccacagctgaccacagggttttggcctggcaagagagccatctcagagctctggagaggcagagccagcatttgtgggggaggaattggttaggagaaacatacagtcttggtctcaggctacgcactgggctaggaacagacagagaaacaatatttccaccaatgttggaaagccagatttagcgtggagtcattttgtaaaactacatgctatatatacttccataggttgctgaacagttgccatggtgaattctattattttatgagaaaatgtgaagtgtctcagaatgcttctccctttctacaccttaactagctaccaccagagaatcaatcccatgtacaccaacaaacactccaaagtaaactctgtttctggttatgtcatactgtaccacattttgataagcagactcccttttcctctcaaccttgttctaatccttcaccttcaagctctctccccctaagtagtaacttcttattctctcttcccactatcaagaactcaaactcccagccgggcagtggtggtacacgcctttaatcccagcacttgggaggcagaggcaggtgaatttctgagttcaaggccagcctggtctacagagtgagtcccaggacagccagggctacacagagaaaccctgtctcaaaaaaaaaacaaaaaacaaaacaaacaacaaacaaaaacaaaacaaaaaacaaacaaacaaaagaactcaaaatcccaacttcccaaatccctttcttgtccaagttattctgctggttaccatattcatttgattacagcaccttggtactgtgggaacatgcatccaacccttaccataccattcttagcttaatttgaagttactatgagcaccttacctagaatatcccatcaactatctcatgatcttcaggtctgctaaggtgttagggaaaaaccatttcaatagactgcaatacccggggatccatcccataatcagcctccaaatgctgacaccattgcatgcaccagcaagattttgctgaaaggaccctgatatagctgtctcttgtgaagctatgtcagggcctggcaaacacagaagtggatgctcacagtcagctattggatggaacacagggcccccaatggaggagctagagaaagtacctaaggaactaaaggggtctacaaccctataggtggaacaacaatatgaactaaccagtacccccagagctcgtgtctctagctgcatatgtagcagaagatggcctagttagttggccatcattgggaagagaggccccttggtctttcaaactttatatgcctcagtacaggggaacgccagggccaagaagtgggagtgggtgggtagaggagtggggggagggtctgggggacttttgggatagcactggaaatgtaaatgaagaaaatatacctaaaaaaagaaaagaaaagaaatcacaacatgtcatttaccatatagaaacctgtcttgtctacagaaatcttggcgtgtcatggtccacaaaaggtttcatactgtaaatgcaccttatgcctccagtcttcttgatagtctgatttgttcctgaaacatacacaaccttgtatcaagctcattccagtctacttgttaactggagcaattgtggtgttacctcttcctcctctagcctgacatcgtcatgtatgtgctgataaagtccaactacttctaaaacaaagtggaaagtcttctacgacacatccctttcctctttagtgtcacagtctacaatgtccatatacaatggcagtagaaagatattatttgacaaatataatatataagggaaaataaacttaatagaatggggcaaaagggcaggagcatgacaaactaaaattctatttttttttccttgtcttagactcacagggtttcatggctggaagagttcttacaggcaatctagaccaaagttttctgtggtttccatataaaaagtaaaaggccttaagatgaagtttgggaaatttgtatctagttgtgtaatactgactataatttcagtgatccttatacagcattcatgaaaccattcactacagtattgacccttaaaaacaggatgccagaatctgcacttcagaattgtaatgtctggcatttcccatggctatggccattgaatctttcccaaagaaacatatttgtgctcaaacattgctgcccatatcgtaaattctctgattacaaaccagtaaatctccaccaaaaagctgggacaactgaaccttccttgctcctccgaaaacttcgtgcataatgaaaatatgcaggaagacttgttattatcacaacttgacttgcatcagttcactggggaaaggcttagagtctcggggatttgagcaaggtcttagcatatcctaccatgtcacaggaagttgttgccaatcattagacaaactcagacctgactcagaagtttctgaacatccaaatccaatgctttaaatgaaacatcttaaggaatttgaggctctaaatgtgtaaaacacattaatattaataactaatctatttaaagtagcttcataattcataaaggcttgaggtatataaactttcaaaatcacattttccttaaaacacttaagtggtaaggacatatcagtttggacccttttcattgaacctggaatcactgcttgactgacttggaagccattagtttctcaagtatgatctatttttccatagatgggttttgtgaaaatctttcacaggtttcacttggacttcgagattctgacttcaattctgatggattctgaacacttgcggttctcctataccttttcttttgagggtatttccctgcttaaaataggttctcatttttcccaagcactcccccacccctagtcccctgtcataaaaaatgaccttccttggaaaggagtttctggtacaaatccctcaggtcccataatggcaaaccctcctcacccactttataggactgccccaccctacagaagaacatgcacaggaaaagcagccctcccttcccccacacatttcctcagtttatttatgaaacatcttggaatgagagcgagctgcttgtggttcctgtggcttattcagggatggtttcctgcaggccagggaagcgggtcaactgaatgacctctatggagctaactcctataccccaacaggaaggatctttgttatgggtatcatttcagactgtgcctggagggctttgttgttccaatgaagagcttaataaccaattatcactgtgattacagactaatattatacttgaaatatgaaataattcttcccggctcatgttttgaatacttgatccctagctagtaggtgataatatctgggggagagatggagcccttaggtgtggccttgctggaggagaaaaattattaatatgggacttttgaagtttatttcccagaccatggttctcctcctgttctctgcttcttggtgtggcatcgtaagactgcagggctttgtttctgcaataaagagcttaattatcagacatcattgcaaatacagattaatagtgtccatgtctactgatgtttatacctttctctgtcaataaaagatgtcagaaatatgccaagatacctttagatacctgtgtgtcaatgttggcttctcaacggaagatggttgacttcctagaaagtcctatacaggattagcttatattttaatacagaatccattgggaaagacgatacctttaaacacaggctacatgcagcatgctccttacttggttcagtcaggtaacacataatcaattcccataaccaagttaactgagaggagttccagtaaatgatgcctctagtctttgtttgcgtgtgttcagacttgtcccggagcactcttacatcatgcatttatgacttcggaagccaggagtgtgaggacagtgactcttccccatttacttgaatgagttaaattaatggggctgggggcacaaaaactctagggcttctctcccaaaaagccaaagtagtaaacacaaattcatataaacttactggtaagacttagatgcaaagttttacactgtatcaaatttaatggtgagaagaaatatttcagaaaagcactgggcagtggcagtatgctaatgtagtttccgaattagtttgatttggattaaagagtaaagtattctcttaggtcaaagttgaaatagatgttccagacccaaggtctttgttcaacatcttcactcaagtgcatgttattacacttgctgctgaagtcacagacatgcttatcgtctgtgacacacacaaaatcaagccaattttaccagtttcattgcaataaaaaaattaaaattaaaaaaataaaaaataataaaataaaacaggggttgagagatggctcagaggttaagaacactgtctgctcttccagagttcctgcgttcaattcacagcaactatgtagtgtgttaatccatctatactgcgatctaatgccctcttctgcattcaggtggctgctagagcattaatatacataaaataaataaacataccttaaaaaaccccacaaaattttcaaaccctattttcctgcatgctgattcagtaattctattttactgagatttttaaatgaatcatttgaatgaaatatattttgaatgttcaaaggtgcaaagatatgagatttcaaattaaatattacatatggttaaggaaaattctggacttaaaaaaaaagtaggaaaaataatcttatctcatttgcccactatcatcaagtcgaaaggtaattaaagtaaaatacacacagagagggaaatgtcattgaatcttatgtccacagtctaacctctctttttgtctctctgctttgcctctgcagtgcatcctaatgtcagtcaaggctgccaaggaggctgtgcaacgtgttcagattacaatggctgtttgtcatgtaagcccagactgttttttgttctggaaaggattggcatgaagcagataggagtgtgtctctcttcgtgtccaagtggatattacggaactcgatatccagatataaataaatgtacaagtaagtagccacacccctctatagttctcattttcacctcatcccgagagatgtctcctgatgaaaaaagctcctaagaaacctaaaatactcaaaaaaaaagtactagttacataatattaggaaaagacacacatagacttagccctcaggacaggaacattttcactactaacttagaaacatcactcaagttttgtttttgtttgtttgtttgtgttgggttaaacaacctaaatccaggaacaggattattcctaactggccctacagaaaatgactacaggtatcagaaccaatcgagttcccattacatataaatatccaagcattcagtaaccggaagaattatttcagctattttggcctctataagtttccagtatagcaatgaaaatatttgcaggttggaaatcaagtttatgaggactgtcatcctggcctcaaaattccagcctcagcaatggaaaccaagtggcatttgaaagattcaaatgaggaaatatcccttctctccaaatatcatgtgtccttccaccagtggctccttccctgcttccctgctgcctacctcagagtgtcccaggtcagaatctgtctggacaattttgttcctcactggctcttctggaacttctgaagctgcttgctctcccattcaagattctaaaggcatccctttctcagtgaggtagtgtaaggtccactcctccaaaagaactggcctcggccatttgtcagtcatctgtccgttctgtttttcctacatttatctgtgctattgtgattcttgtttcccagaacacttacaagtccaaagccaactgtcctttagctttcctgtgtgactgattgattcactgctagatttgagcctcagttacagcacttgtgaataagagtcattatagtgaccactgcattggtttaagctaacattttggtaacaatgttgcaaaatacccataacaatcatggttcatggtaattactacataggagtcagttgctgaaattgtttactctgtctcctactagaaggtgagctttgtgaacactgggcatcaaccccatgaatggggtcaactacagtttttgacatctagtagacagttaaatattgagtgaacaaataatccttgagaagagtataaatgaattatttcagtgtatgttattcaaataacacagcattactatcacttaatgcaaaatgctacttggacaaatggacaggttgagagcttcttatatgaaacaccaggaaacaggggtgattcagggggttttggatttgagaatggttgtgtagacattactggctaaatatccctaacctgaacacccaaaatctataacattttttttaacatgatgtcagtcaccaaagtgtctcagattttagaaactctgtatttaaatgctggcaatcaaggggccccagcatatgttacaaaggtatttgcgtgctacaatactataatttttaaaggatgcatatcaatgagatggctttgggggagccctcaattcagtctagcaaaataacactgaacactgaagttgatgccaaagttgcatgtacagtaggaagatgatccagcagtagtttggagaacatgacagagtgacaattatttttctgtatttttcctttcagaatgcaaagttgactgtgatacctgtttcaacaaaaatttctgcacaaagtgtaaaagtggattttacttacaccttggaaagtgccttgacagttgcccagaagggttagaagccaacaatcatactatggaatgtgtcagtattggtaaggaaggactctaagatttataatgggtgagaaacacatcagatgacaatggcaatcttccacaagatcctgagaggctatatctaataggccctatccatctttgtttataagatactattccaaacctatgttcacatagctatatcctgcatgtattgtgggtagtttaagagtgttctgctacttgttaaggatggctcataattgtttcgaactactctgatcatcaaatatttcagagaaacaaaggaaaagaggagggagagaaggaaggaaatgtgtgagtgggacaaacttagctgatttctactttaaaacaagacttaaaaaaaaaaaaaccctaaatttgataacaacccataatgaaattattttccatatggtggtattttttttaatattgcccaccaatgttgctgtgtctaagtattaaacacagagaagagagaaaattttggactccttcaaactgacagaatgagacagtccaaactttgattaattataggcctgttttctggagaggaggttcctcagacaagttgtctgtctaaacgacaaatcatggttgggctatgttttccctcttttaagtgttacacagctactagagctatgggtttgatgcagttgtggaacagaggctaacccaaatgggaaaacagaaaaagagaactccaagtcccttgggcagtggctgcagaaacctttgatgctgtcctatgctggtgtgtgtacacagagcctcctgattcaatacaagatagtttccaggagtgccccaggctcccacagtgtgcttctgttataatttaaggtgttggacaaataatttaagttggtggctccaccatttcaggataaatgcaacttttatgtctatacattcttttttggcagaaggaaaaccataggtgatatttaaaagttagccgcagaaatgctgggaaccagtaatctcaaatttatcttgactctttttgtttcaaacttccctaatcatgaaaaacacagaaaaacaacttaggaaaggggtaaagttgtccatgaaagttcttctggtctaatcatccaaagggctgatgattcgagataataagttccaaacagtggacaaaatgggaaacactccactgaaatattaaagtgcagataccagaaacttgtaggatttctttactgaggagaaaggacagatatttaagttttgttagttgttaaaggtgtaacattcggtctttaaaagctaaatgctctttaatagtttcttatcacagagtgtttaacatttggcactgtgggataagtcttcaaagaaaattgggttttatatccccaaagttaccaattctatttcttaccataaattttaaatgatgattaaacaattaaaatatcactagctgcccaatggccatttattgaacaaatgacctaggacacagttgtattgtagatgggcaatttcatcaggactggctcctttagcctgttccctaagggaagtacctatcttggtagtcagtccttatgcatagcatgtgctggcttgccccagactatcagggaaaataatggcacgcttcactacacaaaggacaatcaaagtatggaggttcaggacccagaaagctgagatgtggagcgcaaaacacacgataaattccagtgcttagcttaggaccttatttagagctcttcactgcttaccagtagtgtatctttcccctgcccagggctgttagttaagttttgtttctacttagaagataaactgagtaaatagatttcaaacaaaaaactattgcccatgtatagaggtggcatgaaagatcattgtaacaatgtatccagtcctcatggtttgcaaatcaatttagcctacatttctacctttataagacggcatattgtttccactctggatttgagatatttgcttccccctgcagtgtagttctgtgttcctcattgttcctcttggaagtcacagagggggtcaatatatcactgtaaacacagagactgggagctcataacctagctatatctcctattggacatgcctccagtggctgaacccaagttcacccattcccacctctcacccccccacacacacacacccacacttttactgtgaatttcactacatctcagatgacaatgaatcacagactgactctttctagggtctagggctcattaatttttctcaaatacttagttcattgggcagaagaaggaaggaaggaaggaaggaaggaaggaaggaaggaaggaaggaaggaaggaaggaaggaaggaaggaagacagcatctgaggttaagatccttcttaagcatttttaacaaagttatatcccagttttaaattgttcatgtaattgaaacttaaattgaacttaaaccactcttttagttatatctatcatttttctaacctttccattttatgaaagtattatatttgctacattatcagccttttaaggtatttctgaaggaaaaaatatcttcctttaatatgggttttaactatctaatctcattagttatatttttttccttcaatagaattatctaagattaaatcagaatttcatcttaataaccaatcattttctgatttttagatcagtaactacctatgtttcaatttttcaattctggtttcataaagtgaaagtatgtatttgattttatcacctttgttgtgaaagaccaacaatattttggcttccaaattaaataatgctttcttttctaatttgtcctcttaattgtagtgataaatacagacacaaagttaacatacagactaatatttctctttctatttgccttcttggaggctttttcatctatattactatttgatgattaacttggagaaagggtgttaggaggtaaggttcataaaaggcaaaatgttatactattaaatagtgtacttgctttatttgctgaccgaatcacaatggtatagctaaaggtggagtttattttgaagatgattcaatagagctcatttaagtttactgaaacaaattcatttttatatgactctgtgctgcacttgggtgcctgcaagtgataaaaatgcctataaaaatgaaggacattttaatcctctagatttaaaataaaaatattaattaaaaattactttcttatatctagaggtttaattttaagtctctagatcacttaggttattgttcttaaggttgtcatcagaggtagccttcttgtacaataacaccccactaagttagaagacactgcaagaggttaccagaaacatgtttctgtggagacaagctgtactatctgaaaggtttacaattggaagccatttctattgttgtaagttatggtgtttcatggtcataaaaacaggaacagcattttaaaaaccagccaggagagcacagccctgtactactagaaatcaggagacatagacatgaggatcatgagtttgactctaggctggactgcataaagacacattgttggaaggagggaaggaaggaaggaaggaaagaaggaaggaagggagggagggagggagggaggcatgaaaagttgacttaacttttttaaatgccatagagctagttaaaagtccatttgacgtttaaaaacagatgtatcatctcttttacctctgctagaaatgaatatattactatagtcaaaagaatactctggaacaaagatcaaacaatttaacaaaacttttctcaaaggatggaaataccctgagtgaaaggatattgctaatattttatacattcaattttttnnnnnnnnnnnnnnnnnnnnaaaatagcacttttggaatgtcattaaaagtacaaacatctgctacaaaaacccaggaaaagtattaatgaaaagcagagaaactaaactcacacagaggaaacaaatcttcacaacagcttcagaagggcacaccctgccctttaagcaccacgcaaggacatccagaccaaacgcaagttattagctgtcactgaccagaagttcactaaagttagagatgctgctgtgaattaactgagtaataaataacgtttaggtattccgcagcatgggaaacagaaagggcactgactctaggacaaggacctggatagtcctttctgcctgccatcctctagcacagatgctctcaaaccaaatgatgttaccaagtctgcacataacatctctgcattaaggcggcacatctgctccaagctagaaatgtcatcagaaggctagggtggggtccagaatcctgtgctttatcaggcccttcaattaattctgagatctgcaaacatttaattatctagtcaacaatccctcgagctctagtaagaatcactcacttcttacagcagtgttaggaaatttccaaaacgttcattaggtgtgcctgagttaaccaggttcaccgcagaattccaatccagtgagaagaaactgtcccaacagcatatgcactaaaaagcgttctatgtctgccccttatttatgttatcttgcccaactatgataagcagaagctattctagaaacatagatgtgttgaagggatatgttgtggttgtttgtttgtttgcttgtttcactgataatcctgcctgtgctttggttgcagtacactgtgaggccagtgaatggagtccatggagtccatgtatgaagaaaggaaaaacatgtggcttcaaaagggggactgaaacacgggtccgagatatactacagcatccttcagccaagggtaacctgtgccccccaaccagcgagacaagaacttgtatagtacaaagaaagaagtgttcaaagggagagcgaggtacagactcactaacacaacatgcttctttgaatcctcccaatctgatccatatttcactttatatcttatggaatagttggccatatttctaatgccagaagctctaaaatgggtaggaaaagaacactatggacctaagttacagtttatagatctgatatgggttttttctttttagtaaggaacctgacctcagctctttagtgtgatagtgtgataaatgaagcccaaatcaagagactactataagtttttaggcttgattttattttatttttttttgtctgtgatctgccttgttaatgcccaggaacttttgggaagtttcataaacacaaggtgaacatcatctgttgtgagaccataacaaagggacatacccctaccacaggagacattctctacacaattgcttacaaattaaaatggtgcaaatgtttctaagtttcacggtttgaagtaaagggtcaagaccactggggacattatgtctccatgttgctgttctaggcttttgtaacaggttgcataaactattagagcaatattatttatttcaacatttgttaaaatcctgtaagcaccaaggagaaacttaccactgaagatagtgcatgaggtgaaataaatttcatgtagaactacagttgctgatttttaaatgatcatccccatatttcttaatcatgtcctcagtaccactgcctacaaatatgttgtatatctttaactaattatagataattttctagtgagcctatgaatggccgtctccacaagctaattgtcatttgacaggagttgaatacatctgcagatgaacttccttcgcttatgtcagttagtctttcactaattcattcattcaacctacttttattaaactcttacttctgtggccacatatcatgtgaattcctaaagattcatagctaagtagaatcctctctgagagtactatgaagttaaacccagagtccaaagggaagctgagatgtttgaacagatgttcataaacaataccacgtagtaaagtagtttcttagaatcacagaagaggacacgctaaacatgaacattgtttatagaaaaagtaattttgatcacctgagtttttacaaaatattttttatcatatcaatagaattaattgcccaccatgagactgtatggaatcttccattaccactgaaactcagaactagggtactaaaatttttggaaatatgagttatattaaagagaatatctaacttttgtaaatctgtaagaagttttggttaaaacttcgtttcagaaatgcaagttggctagtgaaaacggtctttttagcatttgttatcaattaatttaaaagtcttagattttgaaagttggcattggaagtcaactgcttgagtactctattggtatgctcccatagccacagagttatttctgtttactaaagatcttgaaatttaatgagctacatctggccttcaccatgtttgtttctataaaatctacagcattaacttgtattaagtatattttccttcaagaatataaatgaaatgaagcttattccataaactaaattatattatattttctcttttatttgagaatatgcccttataatatacttctcactgcacttgccataaaattgatgtcataaatgccacttcttaggactagcagctagaagagaagttatgccataaagttgtttgagtatcaacctgtatctgaagtgtgaactgaaatttttgtttctgatctttgttcctcccttccaaggataccacatcattttacattcacaaaattagatttgtggaaatataacagtataaatgttttataatttctcaaatttgataatacatgtactagcaggaattgttgatttcctggaataacattccttgccccactccacttttccttactcttcatttttctgtcaatgagcctgtttcattttttaaggtaggttggaaatataaggaagaaatagaatcatgctcctaattcatcactccttaagacttttcataaattcttttaatgtctacttattgaatatattaccttaacaggggttgggggagggactgtgtgagagagggaccaggataggggacagcaattggaatataaagtggataaataagttaagttaaacagtaagaagtcaaagaaacatatagctatgacctgtgtctgtgctttccataaactatacagggcatgggaacattacccaacttttcacttagccttagatacacagctataaaatacgtgtggtataccataaagtactttgaaatgtaaatgctaagaagaatcaacacacttagaaaggctaccaacaggctaagttgactagaagacataggagttagtatatctagattagctagtcattttttatctcagaatcataaacataagaaaccttcaggcagtttaagagataagaactataaaatgataagcacaagatctatccaccagcatatctatttactgcctaattgctctgatgtcagggcttagagatgtgtaaaacaggaagagtcccttaattgtataccttcaccactgaaagatgggtgaagcaaatggcctagtgatttttaaatgcatcttcaaatcttgatttgaaactacgtctgtgattttcctgggaggatcacagtggacagaagtaggacactcgtgtttggaacaggtgcaggacttgctttcaggatttttttcctgctgagttctaactgccaaaggcggaagctccagggaagaacgatagtccctgacgttcccctacatcgagccttgggctgattggttagaacgtcttggcagtgagcttctggaaactgcttgtctctcccactcaaaccaggatactaaaactcatgctgttgttccatactattacaggggtgctagagatatgaatccgggattggtagttatgtggcagacttcatcagctggtacatctctttactgccttcttaaatgtgtttaaaatagcacccactgctatgttatgtgagggagtgctaactgtactacaaatattcctcagcccctaatcaatgatcttgcccttgtttagatactatgagagatgtttctataaatttacactgcataacaagtaacttcaaaaccgagggtaaaacaacagccatccgtttaaggatctgtgactgggtagtttatacagagatccattcagcaagtctgatcttagctgggctccttcatgtgtctcacccatgttccttcaggatggctgagaactgaggctaatgggctgtgttcaaagtcaagaaggtacatcaagtccaagagagaaaggcaaagtaggtttacctgaggagatacttagaactggcaagcttatccacacccttcttttatcttgtactagtcacaaggtcatttctgactctgaaggtgagaaataagttgtacccattgcctcaggcaaccatgttactttctatggtgccacccaagcacagtcagaaggggaggaaggtgagtgttattgccatgcagagatctttttattgtttgccgtttgatgaatatggtcacttagtctttaccaatctctccttgtggtgctgtctcttcctctataaagcacagtacagtgtggcaagtagttttgtctactttgctttgtgctcccggtgagttgcagacacatacctgcccaagagctagctcagccacagatcacacacacacatacattcactcatttttaaactgccttattggctctgtggctgggctttcctaagccttctgcggctagcatgcccttacctttttcctagctcaacatctttaactctgctctcaacttaacggcccagttatcttctatgaagtccattggccttgctgcccaagacaccatgcccttccatgggtctttttccatttccacctacattttggaagatctaccctacagttctgagtctgttcctactctctctctctctcaagtatctcatctcctcttcctgcccattcctgctggaacctggaagtcctgcctcttgctttccaccattggccactggcgtctttattgatagatcaaaaaccatttgggggcaaggaccttcagtgtcagtaaacactgattcccaattaaatggaagcatcagaaccactcctctttagtagagatatggagtatgtaacttctattgcaccttccatgtataaaatgaagtgtattatgttcccattgcttccaaaactggcaaaactacttaaagaacttttgctgacagtttgatatcaaaactctggcagagagagagaaaggcaaagtaggtttacagagagagagagagagagagagagagagagagagagttgaatactcatctctctctctcctttttatttagtctaagaccgtaccccatagaatggtcttgctctcacttagcctgcctcttcttacatcaactaatctaatatagaaactttctcatagatatgcctagaggtttgtgtcaatggtgtgattctaaattacaccaagttgaaagtaagagttattcatcacaaggagactacaacaaaagattaaaagccaagccaaggagcttgggagatagctcagccattaaaagcacttactgcttttgcatatgacacagttttgatccctagcacccacaggctgacttacaaccatccataactgcagccctcattgatttgacaccctcttctgacctctacaggcaccacacacacatgtggtacacatacatacatggatgcaaacaacccattagtgtacaatcatgaagtaagtaatatttgtttgtaaaaagctagaccaagataaactcatgtattacaactggatggaacacagggccccaaaggaggagctagagaaagtaccgaaggagctgaaggcatctgctaccctataggaaggacaacaatatgaactaacaagtagccccagagctcctgtctctagttgcatatgtagcagaagatggcctaatcagccatcattgggaagagaagccccttggtcttgcaaactttatatgccctagtacaggggaacgccagggccaagaagtgggagtgagtgggtaggagagcagggaggggggaaggtatagggaactttcgggatagcatttgaaatgtaaatgaaggaaacacctaataaagaattggaaaaaatatttacttaaatatctctttgtaataggtgttctaatgtttgagaaattaaaaaaaaagatgccccctttaccagttttttcatattcttggcattaatgtcatacttaatgttcctgaaaattgtgatcaccctcttcagctttcttgtagcaaaaacctatgttgagggttttcattttcataataagaacactagtagctgcagttttcattaaagtttactaacttacttacaaaagcatctactttttctggcaaaatataaaatagaactgcctatattttgttctagcttcaaggcaaatatatggtatttttcctgtgaccaccatatcaatacactgatacatattcttcaaatggctgagtagggttaaaggtacagcttgtggctgtggaacagagtttgaattaatagagcctttggagaaatgacctcaagacctttggcttcactcatagcctgctctggccaactacgattcctgccaactagtagggttccctagagagagactccaagagcatcagcataaatctaaattctgaacccccaaatatagtttccaaaaaggtctttcttgttctttgctaattacaaaataaacaattctcagcaaaaagacacttccttctttcatggtactgtctagctccctgcacccctaccactctttaaaactgctgctgttgctgaggccctttggcacaggagacaaacccatgtttgcagacacaaaaaggatttttaagtctccctctttaccccagcaacttcatagaagccttacagagaaactctgtgtatgcctgtgtctgacagaatggatgacacaccttcttaagcctcccaagaggtgggagggggcagatctaactagaaacagttgatctctgtagcatcattaaagaaaaatactctcaatcttggttatatcatgcatctgtatgagccggttaccagattgaaaaattttacaccagtattcattgggacataggcgctaaaaataacagatctaggggctaaagagatggttcagtggttaagggcattgtctgctcttcaagacagaattagacccttcctgagtttatttccaagccactatatggtgtctcacaaccatctataccgggatctcatgtgctcttctggcatgcaggtatacatgcagatagagtactcttacataaaataaatgaatctttttattttatacaaaaaaaaaaaatgacagttctaaaattatcttaaggggaaaaaaaagctttcagcataggattttttaaattgcattctttcttcattgtttcaattcatcttctgtctcttttcctatttactggtttgttttccattgctgtgaatctttctaaaatttagaagaaatttggctctaaacagattcagtccagggtccatatgtaaatgtcccaatttaccctaatttccctgtccacgtggcttatttcatggaggaatttagttgatcggtttgaatcacatgtccattccttgaagtaatcactccagcaggtatttacaatattttgatttttctacctttcattggtcacattcctacaattaaaactgaatgccattgtgaattgtttgacttacaaataaggatgtacgtgtaattgatccagctcaatacatgcatacacaaatatcaagtgctcaaaaattattcaatgtaaaaacatattctttcaccagatactttccagccaatatgtataaaagcaatttaaataatgaagcctaagagcctaagcaagttttttttttttttgtaattttgacccgatgtgcatgtctagcataatgctaataatatcttcatttaaccaatttttccagtttctgggtttttaggaacatttttatgggattaaactgactttaactgaatccactactccttgaatggtttctgggacagatttgcatataccatgcaaggacagtcattcccatttctagctgcttaaggttctgtgtggaacacaccagtgtgggtgatgacattctgcttaattactcaccatgccactggaactttaagatgaactcaaacttaattactgaactcctgtgtttatgctatacatataccactgagccataactttagcctctatgaggccaggctgctaaatctggaaaatatgtcttatggggagttgttttgtttgtttgttgtttctgttagaggagtctcttttcccccctgcatttagaaagaattggataatcagaagagttgctcaacaaagagtaattatagtccatgagtaaggacagatatgtacatgaacacatgaggggtggttttacttttgcaacaagagcaattggatatttgcaagcacatttatttcttactgtggcataatatctgaattcaggagagacgataatacactaaattcatacttgagccatatgtgtgtgtgtgtgtgtgtgtgtgtgtgtgtgagagagagagagagagagagagagatagagagagagagagagagagcatgcacacatgtgtgcacatacaattgttcatttcaaaagtaaagcaggatataggaagtgtgcctttagtgacatggttagtgggtaaagggtcttgccaggaaggctaatgatatgagctggatcctggggacccacacagtagagggacagaaccaagctatatagactgtccttagactctgcatcacacacacattcacacacacacacatacacacactaaataaaatgtaatgattaaagatatcacacacaattaaaacacaaaagcattaccctaattaacataaacaatcacctagttttccataatataatcattataattaatagataactatttttatgaaatgcccacatatacagagaaatatccctcagggtaatgaatatactttgtaagtgtcagatacattgtctagttgttctctgatttatatcacatactgaggacttatgcttcaatttctttccctcgaaattacaacttagtttactaaagtagttcaatagcagagccctagtagatgaaacatttgtccagcttctcaagtcctattctgaaatgtgtaagaaaaggaagtttatatctatctaaaatattttagtgtgcgtgtgtgtgtgtgagggggttgtggtgtgatgtgtgtatgtgactatcggtgtgactctcagaggtccacgttcagcagtcagttctccatttcctctaagttccagggattgactgaggttgacaggctcaccaggcaagcacttgaacctaagtcttctcaccagctaaagagtcttccttctacttacctgttctacccttttccagctaaagagtcttcattctacttacctgttctacccttttccagctacttccaaccctggggtaacctttttatgttgctcctcttgtcttattttcctacccatgcgtatttacctagttaactaatagacacatatatgaacctaattaattaattatctaattaattaattaatatatacatatatcctgagacaggaccttcccacattcatgtgtaaatgacaaaggtcaatgccagcatgaccctgaattcacagtctgttttttctcttcttccaaaggctgggttacaaatatgcatcactacatccagctgttgcaattttttccttttattaaacatggctttttttcatacataatatatcctaattagtttcccctccctctactcttcacaattcaccacccaccctccttcccatgcagatctactcactttctgtctctcattaacaaacaagtaggcttctaaataatttaataaatacaatactataatatataacaatattaaagtaacacattggaatagggcaagataaacaaacagaaagaaaagagcacaatacaaggtacagaaaacagatacagaagtgaagaccaactcatttgcaaactcagggatcccataaaaacactacactgtaagtcacaatgtatacacagggagtctgtagagtaaaaatagagaaaaacataaatatgttaaaatataagataataaaaaaaactctggcatataaggaatctttttttttaatattttatttatttattaatttattaatttatttgtttatttattaaatgtaaatacactgtggctgtcttcagaaactccagaagagagcatcagattttgtcacggatggttgtgtgcagggggctggtgagatggctcagcggttaagagcgccgactgctcttccaaaggtactgagttcaagtcccagtcaaccacatggtggcatataaggaatcttaaaggactccactgagtttgttttctgtggtcattttctggtaggcatgttacctacttctaaaagtagtttgtttcttccttggagaagactaaattttcatttactagtggttatcaatgggagattgcttcttggttaggcgtggggtcatgtgtccgcttctcctttcagctctagcacttcacagttacttgagccctaggggagggatttaatggaggtatcctacttagggctcagtattccatattgtctggctgtgggtctttgtatttgttcctaactgttgcaggaggaaacttctctgataatggctgaggaaagcactgacctatgagtgtagtaaagtgtaattaggattcattttactgctatgtgctttagtagcatagtcatatttggttttaccctcgttccctgggctatctattcataagttcttggtcatctaagcagtaccttgtattagttccatatcatggagtatgcttaaaatcagatattggttggatactcccataaggactgtgccaccattgcagcagcaaatcttgcagacaggataccactgtagatcaaagggtttataggtgggttggtgtttacctttctcctcagtagtgtgcagagtttcttctatacattaacatatagtagtaaaatctctatatagacaccagcttgacttcatcatgttcaatgtgttgtgtaggtgttgtcttcaaaaatgggcctttgctgtcagtttgtggagagcaatctgtaggtttgataacaggcaaaggtgtttgggttcccatgggatccctttgacctataattcagttagatgtgatccat

SEQ ID NO: 14 - DNA, 702 bp, Mus musculus
atgcagcatgctccttacttggttcagtcagtgcatcctaatgtcagtcaaggctgccaaggaggctgtgcaacgtgttcagattacaatggctgtttgtcatgtaagcccagactgttttttgttctggaaaggattggcatgaagcagataggagtgtgtctctcttcgtgtccaagtggatattacggaactcgatatccagatataaataaatgtacaaaatgcaaagttgactgtgatacctgtttcaacaaaaatttctgcacaaagtgtaaaagtggattttacttacaccttggaaagtgccttgacagttgcccagaagggttagaagccaacaatcatactatggaatgtgtcagtattgtacactgtgaggccagtgaatggagtccatggagtccatgtatgaagaaaggaaaaacatgtggcttcaaaagggggactgaaacacgggtccgagatatactacagcatccttcagccaagggtaacctgtgccccccaaccagcgagacaagaacttgtatagtacaaagaaagaagtgttcaaagggagagcgaggaacttttgggaagtttcataaacacaaggtgaacatcatctgttgtgagaccataacaaagggacatacccctaccacaggagacattctctacacaattgcttacaaattaaaatggtgcaaatgtttctaa

SEQ ID NO: 15 - protein, 233 aa, Mus musculus
MQHAPYLVQSVHPNVSQGCQGGCATCSDYNGCLSCKPRLFFVLERIGMKQIGVCLSSCPSGYYGTRYPDINKCTKCKVDCDTCFNKNFCTKCKSGFYLHLGKCLDSCPEGLEANNHTMECVSIVHCEASEWSPWSPCMKKGKTCGFKRGTETRVRDILQHPSAKGNLCPPTSETRTCIVQRKKCSKGERGTFGKFHKHKVNIICCETITKGHTPTTGDILYTIAYKLKWCKCF

SEQ ID NO: 16 - DNA, 99232 bp, Homo sapiens
  misc_feature (1)...(99232): n = A,T,C or G
gtttctctcaaagaggcatttagaagatggtcatgcagagaaaatactttcatacagtcctcactaacaggtatgcgtataggagcaattttgaaaacagttaatttttcaaagaaaatgagtaaaaagaaactatatgcattttgccccacatccttgcattccataatatatactcacccactttccatctttggggcatgttctgggtaatttttcttccttcctatctcatgtcaaatatcaggtgaatttatgtcattgttttgagaacaatttatgtataatattttatgcaatctcctcctatgtttaggaggttgccataatgtgtcaaatgtagatttttcttaatacttcataaaactatctctagaaaactaagtgcatccttttactaagttcatccctagcacactcacacagctccttttgctgctgctttttcttgcagcttctgcttctgcactcacttttccacctcccttagttactcggtgtccttatcagacacaggtctccctcatactcacacttcataatgcccctgaacaggtcagaccctctctccttgtcaaatttcagagatgtgttcagaaggaaacaatctaactaaaataattcacccattcttaactttcttgggaatatttgcatttaaaataaatttctaattgtgatgatttcaagtagtatacataacgatgtgaataattttaacaatgctaaaaaataagtagaggaaaaatacaaatgtacatgaacagagggaaagcaagctacacatacaaacataattatttgaagaagaaatcctcaaggcattagttgtctattagaaaccaggctgtccttgaatatctagtataccagttcttttgggctgccacaacaaaatactttagattgagtaatttataaaacaacataaatgtatttgttacagttctggaggctgggaagtccaagatcaaggtgtcagcagagtcattgtctgctgagagcttgctctctgcttcaaagatggcacctccttgctatgtcttcacatggaacaatgggcaaagggagcttcctggagccacttttataagggcatgaatccaatttataagagtggagccttcattacttaatcacctccccaaaggccctacctctaaaaaatacaatcacattagagattaagtttcaatatataaatttggcagagagcacattcgaaccatagtacagtgtatttttttaaaaacacaaaagacaccatattgtatataacttacaatgttactttaaaaaagtattgattcttatgatcataatggtgaaaattcaccaaaaactcatgaaaacccaatatatcattcctaactaaatcagagaatcaagtcacaatgaggaaataaatccattagttaaattgcctcctttcctaaacacttaaggtaaatctatgttgtagggcaaaatgattgtacctcatgtcattaaatctcagaattatggaatttaatgagatagtgcttcatgtttctatgcactaaaatgataagttctgctgccatttttagtagacaaaaggaaggcctcctggtaaggaggcattttcacaggattcttttcaatgagaagatgtctatattatattcacaaaccttaagtaatactatcctagctcttaagacaagagaaaagggaaggaaataacaggctgaagaaaaacacttgtgacttcccccaaaatgagaacattgaaaagatttttctctgagttccaaaccataattgcttcttatttatgtacccaaagctgaaaatttgtcccaccaatggcctggacctttgtactgctttgattttgtgaggcttcaagtatagaattaaaactcaattcagagaaagaactgatctagaaccagacactctgtataggtggtcagatagggtatatggtaaacctcagttttgctttcttgcttcaattaggtatcaactttctgactggccaaagagctccacatttggctttatacagaggttaataacctgcccattagctctggggtggatttaaaatagcctacaattctttgcagttcctcctatcaaaagataaagtctattgggtaaattctggaatctaggctggtcttttgacttgctttggtcaaaaaactgcagtagaagtgacgcttgtagggcttccaaggggccttgcaacttcctctctcacacttctggaacccagagagctccacgctcttgagatgtaatactacctgggaagagaggcctgctatctctgctgtgtcagctgacctgacagctggatgtagcatatgagagagcccaggagagaccagcaggagagtcagtcaacacacaaaattgtgagaagccataaatagttgatagtttaagccactaagtttagaagtggttcattatacagcaatacgtaactgatacaagctccatggaaagaaagtcctttgttctcctctatcttcttgcagaatacttctcagtgaggcaatcttatctacaaatatagaataccacctgccaaattggaaaaatatcatgaccaccaggcacctggagctttttcataatggcttgaaaccgcctacacctgtgacataccccacaggccaaagtgaaatcaaaatatgtttctgggaagaaaagattatatggggtgaagagaaggagagaagggcagagctaaaccagccctttatcactagtgagtaagcaaggattagatttcagaatagggaacttttagggtggggagagctggaaagcagaagggatgagcctcagcaggggatttttgataaggatgggtgcacaaaacactgtctggggagagcatgttacaaaggaataccagaatgtatagagagtgcttgggcatggagttggggcaagagaatgggaacagccagacacttacgaagaccaaccctgatttctttggtagttactctaaacattttcaaacacttgtaggaacaggggaaatgaaatgtcatctttctcacatgagaggaatctgtccacattctcactacagtaaaccagtcaaatcattaacccacacaaacccccacacaggtatcagccgtgaaccacactcccacaggatcaccactgagccacaggaattgctggaagaggaggaggcctgatgccgctcttcgagtctggctacctccctagcaaacatgtagccaaccatgaccactgacctcctcaaagcaaggcagaaaaggggcttgcccccctacctctgaatcagggccagcctaagcaaaagaaggaatccttccttatccccattaagattcaccattcgttctttaaaagctgtattatcttagacacagaatttatctctttcctcaccactatcactgccccccaagtattgttcctcttcccttccccacaacacaccacagagcccttatgacacagcagttaccacatggcttatgtgcctgcttccctcactgagggtattcaccttgagggcaggggcctagtgtccctagttttgtatctcttgggcctagcatggtgcttgccacatgttcagtgagtgctgaaataaaagtagccagacagccaaaagtagctacccaaagtggcaccagcagtaacaaatataaaccataactgatagtacatatataggtggagagaggttttcattctgttttgtttatgaatatggcagctttgaagaggtacttcctaaagcttgttgctgggtgtgtccagttcatttctgtcataaaccatagcattgcttttcatctgagcaccaatagaacccctaatataattccttcactgttcttgccttaaaggccatgcacaaaactctgcttcagtgtgtagcctggagttacccatagtaggcaccatcaacaaatattcatgggatgaatggatggcacattgacgttagctgccatctttcagtatgctttccaataaactacccttactcactgtggattgtgcaaggctcgttttggacctaacaggaaaaaataagtaaaaagtgacttagtcaaaccatgctttaagatcaatgtcagcttttgctgctgctgtttcttgactcccttgttctttcttttcctgtgacttcttgtttctgattgcctggctataattttaaacatgaactttgctttgctctttgccattctgattctagttattcatggcgatttagcccatgaccttgctctgatgtttgttgtgtgcccacttccttactttataagccttcctggcttgtaacataccctggccctctcccttcatgcaacttagttttaatcagagtgcattcctctggaaaggcaggatgacatagtaggaagggcactggcattaaatcagacaacttggtcacaagtccaagcactgacacttttgtgtcacttagggacccagcaagaatttttgaaagacatttttataaaatggccattttctatagtgcagacagggttgaagaaatcaagaggagatgttgaggcaccaaggaactaaaaagagggggaagccatttctatccctaagcccgaggagtcaaggagggtaaatggtgattctgaaacctacttgagtgctagagccacagaaaaaggactgcatgacagggctgtagtctcctgaaggatgtggcaaatgatgccaaagcagggaaggagtggcatcacttttccttcccatgatctgatcacccacaggtacccctggctaggcctgaactcaactggaaagcagaggaaaggagctctggttatttagtttatggaagtcaacttcttgggggacagagaggacagagaaaatagactttggggtaatacaaaacagccagaatcttataagcttaagcaagtgactttatctttctggattcggttgtctcatctatgagacaatgttttgagataatacatgtaaaagaagctgcaaaaattactcattggtattatccctcatctagcactctacatcttatacttttttttttttttttgagaaagagtctcgctctgttgcccaggctggagtgcagtggcgcaatcttgggtcactgcaacctccacctcccgggttcaagcgattctcctgcctcagcttcccaagtagctgggactacaggcacgtgccaccacacccggctaattttttgtatttttagtagggatggggtttcactgtgttagccaggatggtctcaatctcctaacctcgtgatctgcccaccgcagcctcccaaagtgctggaattacaggcgtgagctaccgtgcccagcctacaacttatactttcatgtctttgatagtaacccttcaacctaaatctgtgaccacaaccactcaaccttcactgttgaacttcagaagaggttcctgggatgaagggtacatggatataaatcctcatccaaagataagaataggaaaaataaaatgtgacttttatttccaactttttattccaaaaaagaaagtaataacataaagataaaaagaatggctcttagtgagatccacattcctccctcatctgtgattcctacaaacaggtctaaatgagtgctctctttatgagatgcagaagtcctttttcctgctctctgtaggactctgcctagaatctcgagtttataatttgttctttcttgttgtcccaaagtctgcagacatctagacagattgaacttgtcctggatttatctttgctgggccagagtcatctaggattcttgtaatgggttaggcatttccagaaaatcaacaagtttgaaagcagatttctaaatctggacctattcaattaaacacaattctgtaagtaaaagctgtgatgtcacacaactagaaatagctctgacatttgcaattacaagtctgtctttctttcttagaaatagttacattattgtcagagctgaaaggaactttggaaatggtttagttcaatttcctcatttttcagatgaagaaacctgacacacaacaatataagtagaaaacaaggactcaccttgatccccagattcacaatttagtgccctcttactacaacatacagcctctttgtactaaagctccatgatcatgcaaaattttctgagctgttaaattctttatattgagtactattggatattcacattttaagtgagcccagcaatcaattgatttgtgaaataagttttaaacttaggcatataccagatggtgcttgccacaattacataaatgtcccataacttcatctgggaggaagaacattctttcttgttgacagaaagtaatccatcatgggtcttgattttctcattttcttaatgctatataaccatataatcactttttaaattgctacaataattctgtctcctttctttctctctctaaaaatagttttccatcatctactaatttcaatggtgtttaaatgctgctacccactctgtatttcagggatgacttctagctgcatcagttacacacatcccaccagcagtaccctgtttgacttactgactcagatgcatccagatctgagtaactggagagctgtgcattttcagaatctgcatattcgctctgtggtataatgactgatgtcagccccaactttgccaaacatctctcatcactactagttatatccctttccaaactattgggcttgctctctctttctggagcacaccccctttcacatatttgcagtatggattcaacaatatgacaatcattttctttccttagagtgccactgctgcaatggataaaaataacttgttactgttgtcactgcctggttggaataagtggaaggagagatgagaagttgcagtatctagtcgggatatgcttagcctcctatctttgttcaaagctattctattctcctggcccaagtctcccagtctcctggttatccaaaactccctggaactaatgtgttttggagaaaaataagcaaatgttgacctctatgctgagcctatggtttttaactttctttaggcttgagctctgaaatccactggcagccacaggctactgtgagtgttgttttcttgtttgaagaaaaaaaaaaaggtactatgttttagaaaatatgccatggcatgcttttcataagcttctaagacagttgagggaacgtaaaactcagccaggcaagtaaacacacatttaatatgacggtaatatggatcaggaaaaagttattctaaagcacagcatcaagagagaaagaatactctcctcgtttatttaatgttttccttatgtttcctctgagcagagcttattccttgacaagcttttccttcccactgcatctagcacttcttttctgggatggctcaagaactgtagcttctcatttggtttgtttatttacttacactgccattcctgttctcatccaaactaacatgtgtctgcacaatgcacagtgaaaagtaaatgtctttcttcatgtttatttccctgaagttgttcatcaaatagctttttcacatcccttttgcaatctcatcccatccggctcaagtatcccagattagaaaggctgtctctggagtccttttcaaagggagcctcccatagtctttaaatcccccatgttttatggtgcagatattcaggatttgaggtattagcaagaaggaaagcaaagcagatggggacaggcacagtaaaatagagtggcttcttttttggataatcattattggaattgtcttgttatctgtaacttcgctggttcaaagtgataaactcagtcatttataagtagacattttgcaacagataaaggatggaaagtctgtgtgtgggggtgtgcacacacatgtgcatacaatgtacagaaaaagttctaccactgaaagagggatgttgtaaatgggagctcttaaaaagaaggcaaaaatcataatcctgttgaggtgtcatcttcctcataatatcaaacctaaaggagactatgcctactttcgaaattccaacacgagcatgcaaaataataaatgatatttaattaaagaattaacatcaaaaggccatctctcagattctaatttttagcatcttgaaaataatgcatatttcaagttcccttccttttgcatccaggccactttatcgcctctatcctacttttgggatgtataacaaatataccactaaaggactccagagacatacaattcacagcattgcaaacttacaaaatgctctaattcatgtaaatttacctaatttacataaattgaaggcaatccagtaatagggattacaaatggaggaaggagatagaagtgcaagtgtcacttgctactctgcaaggctttagcaattgacttacactgaattatttgagcacaaaaattagcaaagcacctatgaatcagggactctttcaaagtgacctcccagaagtttgctgctgtgttaacctgtagtgctagtgtagtccttcagatattctgttaaatataatacatagggcaggcttatgttaaaatcacttgaggcttgtgactttcgactaaatacttcttcagtaattactgaaaagttcatcggctggtgctaccggagaaaagacgtggaaagctcaccatttactaacgacagccagggtgtgccccactcaggggtgccggccctctgttctcccatccctgggtgggccagagcatcttactctctgctgccttgggcctccacttgggctgggaagataagaaagtagtggaccttccccttccttccccaagactgggaaaatctttccaaatcttattcccagtcttccagatgcgagattagaatgtacaacagatcctctcaagaacactgggagaccgagggtgggagagaaaactccaaggggggcgagctgactatagagggaattgcctgagcgggaaaggaatcttccaaagccacagaaaagccttggtttggaagaaagccgtagcacagctgcatttccaacgggaaggtcctgagcgcacacacttctgggtcctccccgctcggagcaggtaaacctcagagtagctgaccggcagcacccacagagtttcctccccaccacccgcctggcgaccaactgcagccgaaaagaaagaaagaaaggaaagaaagaaagaaagaagaaggaaggaaggaaggaaggaaggaaggaaggaaggaaggaaagaaagaaagaaagacaaagaaagaggaaggaagaaagaaagaaaagaaagaaagagaaagaaagaaagaaagaaagaaagaaagaaagaaagaaagaaagaaagaaagaaagaaagaaagaaagaaagagaaaaaagaaaaagggagaaaggcaacagaggagaaggtcaggaaagccgggaacaagtcagcagccagaaactctccagcgatctgccaagggggagagggtagttgcgcgccggcgctggggatggggtgggggcgcgggggcacaagggcgcaggggcgcacggccaccgacagccgggtgcgcctagcttgaggccgcggagaggagccgaactgggatgggtggggggtcttcggcctcaacactgcctgccagccccagtgcgcccaagtctccccgccagagctgcccttctggaggggctcttcgcacgcactgctttccccattcttctggctggaattctccggccgtcactgcagtgtccagagatgctgcgctgtagacccgggaccccttaggcgcctcttcccgtccctctgccaaagcgcaacgcctgtacttttccagctccctctttccctcttgaaattgaaagttattgaggtcgctcagggttgttgctccagcagtttccttccccgcccccgagctcccccccgccccccacagccatcccccctcctctccccctccctgccctcctctccctcccccctccctgccctcctcctcctcctcccctatgtggtgctcccgggagcccagcccaacactggagcgtctcctgctcgcgcacgccagaagcagctcggggtctctccgccgccccttggccatggccgctgtgccgacggcgcccgctcccctgcgctccaggggcccccgccgctgcagccgcagccgccgcagcttctgagcccaaggggccgccgctgcagccgccgccgccgccgctcgcccgcccggatcccgcctgcggcagttgccgcacaacatgctacctgcggccgccccggcggctcctggaaccccggttcgcggcgatgccagccaccccagcgaagccgccgcagttcagtgcttggataatttgaaagtacaatagttggtttccctgtccacccgccccacttcgcttgccatcacagcacgcctatcggatgtgagaggagaagtcccgctgctcgggcactgtctatatacgcctaacacctacatatattttaaaaacattaaatataattaacaatcaaaagaaagaggagaaaggaagggaagcattactgggttactatgcacttgcgactgatttcttggctttttatcattttgaactttatggaatacatcggcagccaaaacgcctcccggggaaggcgccagcgaagaagtaagtgcagggttttttacgcgtttgctccctcccgccgcgttcacctgtcgggtcgctttgcctgtccggagccggctcccaactgcagcggtcctcccgccctgcgcctcgcagaggagatgcaggttcgggctttgggggtatggacggcgtctttcacccttgcctctcggcgcccctgccttccgcagcatcctagccggtgcgaggggcgggcggacgcggcgctaaggtggctcccgccccatggtaacttcaggttcgcgggaaagttcggtcctgggttagactcgcacccgggatttgtgctttccttttgaggatcggacaggggcacccagccgaaggcacttgggactcccagacgcaggatgcctctgaccgctgagtaaatgacaagggaggcgcggccgcggtacccgctcacctagcgcaaccgcctcgcgcggggagacctcggctgggcccttaggctggactccggtagccgaacgcccgctacccggccaggaagccagggagcgagcgcctgcgcggccgcatccccgacacgcaccagcggagccaaagggcgcgcgaggcgatggggttcgcgtgtctgcgcgtttgcagagctgccggacgtcccccgcccgagggttgaagacagcaaaaccccagctgtggggagccggaggtgcggagtttccaggttctctcttgtcacatgtgagcgtctgtaccatctctggccctttcaagtgtgtcccctgggacacacacgtacagagagtggggtctccctaaagattcgcctcctcgctgcccttaatgctgttatttggagggttggattgtgatggcttcttaagacggtgtcctagctggaattaagcggacaccaccacggcagcctcaacctgggttggtctgtctgaaaggtagaatcttcccaagatgaagggacagatgcgaaggtgtcacctctcctcgctccagggtagcctggcgccctcgctgctctagtgtctgtgttcccatggggagtcctttcgcagatctcagagcaggggcgaccctggctctatggttgggggcgctggtggagagagggaggaggaaacttctcctggagctcgcgaggggcaggaagcgatgctgctgctctgggctctcgcacctccgcggcgtgcagcccaggcccagcggccccacctggtttcccaaggggatccctctcccagcgtcccgcccgggaagcctttcggggcagacgtcggggcagcgcggaggacacaacaccggcttgtgtgagatggaaatttagtaatcgcttctcggccgctgtttgtccctgccctgcccctgggcatgagggtcccctgaaagctccctttgtattgctggcctcggccagacaaggtttgattcacctgaaaattgccttttaaaaaggtggcagtgccagagcgacaggggccctggccgggcctcaccgcctttaggatcacctagcagggggcaggagagcccaaactaaatatgtcagggcatccgatttattattcttggcctccgaatggtgtgtactctggtaactccccacccactctttcattccggcccggacgcggaaggggaggcctggggttcagcggtgtccacgcgcctggcggtccccgcctcctctcctcccagggtctggcctggggaattgagtctcagggtcagtgggcatagggagcccgggctggagcgcaacccactctgctttccatccgctcttccagcccgtgcccattgggcgtcccagagcacgctctctcctttacccccaccgaggacccccgggctgggagccacacacttgtcaaggagggacagggtactgagtgtcagaggcgtctcgctttgcagttttggggcccctgattctgaaggaagacacaggaaagaaagcttgtagtccttttgtgcccacctcccccagcgaggaccacggcgcaggaagctttccccgggcgctgcctcagggagctgtgggatgatgcacctctaggttgggccgagaggagtcaaaaggcaaactgcttttcgacctgccttaatcatctcaaggccaagtcaaaggagacctctgtttgtgttgaggggatgaaagaaggaatagtggaactgggttgcaattccaatttttctgtgggagtgggactgggagacagcacccacagcgatgctcttgctccttcgcacttgagtctgcgtttgcggcttggtttgctggtgcaatcctggtagaggggcgaccccttgcgtcctcggaggagacagactagactcttggcaggtgcagtatgacttaaggaggaaggagtggagggtagagaggtcctctttaaatgcccagaaactcaaggtcaaactgcatgtgcacaaactcagatataccgtttgttttgaaatctctgggggaaaaaaacgaacaaaaagattcaattcacagttcctgtttctcaagtaaggactaggaaaagtttttaaaatgaaaacatgtggtcaaacgtgttttcaaaagaggctggctatcctaattgtttcttcaagagacaattaagtgaatatttaaggagtcttctggcctgtagttatatagtttcaatttcctaagcttaaaatcatcaataaagatatgacaggtagaaaattaggtgttaaaaacttctacaaaaaatttaatggtctctcttgatttagtaggaaacttttttgtaaacaagaacattcatttgaagtgttaaatattgtcatgtccaaagaatcatgcattatcctcagaaatagcaaataaagccatatcagtattctcctgtttccctaaaacaactgtaattccatttgtctctactttgatataaactagtgatcctagttattacaaactagtgtttcttctcataaaagaaacaatgttttaagacaagacccttgtactttaaaatgtctatttagttatgggtgaataaatacacaataaatttttatctatttgaattggtatacagctcttaaaaatgactcaacctttgaattccagattgtgtgctaataacattaagaagcactttttttttgccataatgatagccacagaatcttagtggggcctcacattttcacgtggattagttgcttgggccctgaaatagccactgaagtgaagaagcaggtacttatcttcccatcttagaaagaaaaggcctgagaactagaggctcagtaacctacataatgccatatatctagcaagtggaacttgtctcctgccatgaatctcacagttatgtacacctttattctatattctggtcatagagaagatatcaggtttattaagtaataaattagatggtctcaaggccatcatttattcaataggtttagagaataaactgttctccttgactggaaatttttgaactcattattttatataatggtgatcaatgtcaaagaattaaatacctaatagtaaagttttctaaacggaatatatcatttgattatctaggagatactatgggattattctgtgccagaaggttattgttagaaacatcagatggcatttagcatcctttttatttgatgccatctagtagctcggttttaattgttcagactctagataaatgcaagttttgaaaagccattatatgcataataatttaaaagcactcattgcacaatctataaaacttcgcaagtctttcataaagacgtctgaagaaagagagaaagaataaaaaggaaataattttcatggtaataaaataaaaacagactattggaatgtactggtcattgctcatgacattgtttcagatgttgagccagtctttgaaattatgacacaccctttgtgattatgttgtgaatcctggaaaataacaagttaactgataaaatagaaaaatctttaattctactatacattttgtaatattaatttcaaatgaaagtttggtttggatattgactacaatgtatttttcacacttgtctacgtttctcaccagtctgccttatttttgagagtaacagtgttttaaagatacagacacgaatagaatttgctgaagaaagtgtattctttgatacgtcgtgtaacagctgtataaatcaagacaaatgcaaattcatatgcggtagtggcaacatctaaatgcaaggaaaaacatctttgtgaactcaaatttaatcatcattacattatcagggttgtttctcaaaatatcccatggtgacactattttaattccgtttattactttaatagaaggattttaacaagaacgttagaaatggtaattttaaaataccttctttttagccccaagttactcaagtaatgagaatgtaagaatgagtatgaaactgatttaatgttgttatttcaatattcctttaaacatgaaatatgaagagtatttgaacttgcaaatagataagctttactaagtcatttctccattaaataattccctggcatttaatattgtacaaattaggtccccagaaagcaatgaatggaaattacaacgtgtagtaaaattttattttccagttattatggggaaacccttgctgcattgctccaaaatgaatttattagacatctgattattttagattatttgaatctggacagagatctccagattgctactaaatgtctaaaatattttctagttcaatggttaatctttttttagttgtaataattcttttgaatcctatgcaatgttggcagagtactatgtagagttttcagagccctatgtagagttaagaccaaaatacacctctgcaattataagaatgagctatgaaaaaataaaactattctagatatactgatttgccaaattgtcttttcccctttgtctccatcccaatgtttcattttggacatatcttgatctctctcttcctacttcttcactattcactcacatatcccatccccaccccaaaaaaattattttccaagtagtgaattcttgaaatgccatcagagtggatattgtgtttcatgaaatgtaagaaaaaactttggttaccattaggaaaacatcattcagttttaagagcacagtaaggatcatgcaagacagtgtgttgaaattatgtttgacttggttaggactatttcttctaacagtgcattatgtgctggcattttttttttgaaaataataatttgaaaaaatgttgcatcataaattgcacagttttttttttgcttggcctttgattttaagggcaaatgtagattgctttcttaattagagatttttctcagggtttcacatgattgaatatcttaaaatttaatatctgacaacctagtaaatttgaaatgctttgcaaccataactaaacacatgaagtacagcatatacatatgtaaaagatgctagccatcttttctgtttcttcaattctgcccatcagatctttccattcaggaatattactggcattctgattaaagtagtcatccagcaatactgaaaagaatggggtgttccattctcaaagactgtgggggtgctgagaatgctaaatatctaaatgtcattgattgctaagaatcccattttctgctctaaagtttcaataacatggatcttttaagcaaaatacctgaattcttttcacatttgaactgtttgaataatttttaaattttatttttaaaaaacagggttgcaggtgcctcttatctgataagagcatttctgctttatttgtcacttggcaagggacctaggtgctatctgctgtagctaaaatttttcttgaatttttttagagaaaattcattggtactaaagaatatgattgtccaattaaataaatatttaatggcttttaactgtccttatgttttatgcaaacatctaatctactcttcaaaacaccgccttattaatgtttcatctgacctttagaatttaattaattgcaagtatcataagtttgtggtagaatctgagacctgagaaagaaggctccttagtgtatgttgggagaaggtagactcagaagttaaagacctgggttccagatccagcattgctgctaatgcctgaataacccaagaaagtccttttactataccaagctaaagtttttcatctgcaaaatgaggaggttgatcaaaaacttagatctagtgatccctacggtttcctcaacatttaatcttttggtatgagaatataagtcacaactagggagttaaataataacttgtcttattcaactaaatttaacagataaagattgagtacaaacaaacataaacattcattgattataagtaaatttatcacataaaggttaacgagtaagtgatcaatgtggataatgaattaattatgatatacctcataattcacattttttattgtctgaaaaccatagtcacagcaacaatcagcatactcagtctaccccatcttgtccttaggctcagggttagggagctggatcagaatactgactcaagggtcacttcagagcttccctagcatggcaggctttcagaggtggcctgtaattatgaggaagagatgatttacaatagtccaggtttaagaaaataaggccctaggctacaacagtgaatgactgcacaaaagagtatatacagcagataatttcttttaatcaaatcagtagttcttggcaattaattgcatatgaaagggaaagagatggaggcccatatttggcaataaactttggagtataaggactcaggtctgggtgaatggaaaaatgatgacgatcaacaaaaagaaaaataggagaagcaggtcttgttggaaatctgtttctcttttgaggagccagtaggacgtttaggaactcaaaactcaaaacacctgggattagagtattagggctgaacacaagtacttcagagtcactcacataaaaatgatgtttattattatcaaaagtgtgtgctctcctactgatacgggggtgtaaaaaatgtgtgctgtgatgacattgagactcactcttcttggtaatgtcaaaataacattaattacattaaggtaccttgtctattttaagtagtttaatatatcattttcaactgtggttttttatggtttttataatactctctgtgttacataagaggatggtcactggtatcataagctgtagttgttgttgccaaatcttgcagctgaaaattgcacttagaagtcttcttacctgtggaactttgccacagatcataaggagacctgaaaaactatgataatgaaaggcaagtttacataaggtataaaaataaaattttgaaccattgaattgggtgcagtatctgttcatcactgtagcgttctacttttaagtagatttctctacaaagtatgctctcttaatataagagaatctctggaagggataaaacttgaaagaatccagtccatctacacagtgtgggatcacttctacaacatccccactgagtaactgtctagcctcagtaacagtcagccccctaagctctccccctttttcctcctatttttagggcttctgtatccaaagcagtttattctcctagtcctcttctttgcacttggcatgggcatggtattagatctagttaccttaaaacacctttctaaaatgaacacacagtaacgcaatgtgctacattcactcccaaaaattgtccttagaaaactagctggtaagcatatttataattataccccaatacaaagcacattcctgagagtaagtggtaaagcagcccccattttataaccacataatacaaaccactaccacacaatataaaataacagaatttgtgagctgcttattttagaacactgttttcttaacatatgctcgataagttggtaagaaaaacagcagtcctttctcattgttttttgttcccctgttctacaaagagacttcaaaggtaagaacactgtcatctcaacaaaggctgtcatatatgcaaagcaaatatcaatcacattttgccaacaagaaataatatgccaaagtatgtgtaagtgctacatggcaaacaacagctttttagctctcagagccactgttatatttatgtacatcttatctaaatatgcatgtatacttactaaagtgagtattatgataatagttattactcaatagctcccatgttataatcaccagtaagtgccagaccctttgcttgatgcttttgcaaaaattatctcatttgatcttcatacccacctgtaaggaatgtgccaatagtcccactttcattgatcactcaaggaattgaggtggacctcagattccagtctaggctagactccaaagccaaggtccttctttgattcttcactccaccttaacattagggttggtacttgaggcaatcatggtgcattttctaaattccacccactctttctttctcttactctctcttctttcctccttctttctttatcctcatttaacaaaccataagccttttttcaaacatttactataaaggttgcttctggtattcaagtaccctcctctacatcgctttcttttccttaccctttgtcctctctttccttaaacctgtcttattgatgagttttaaacataaaagtttgctgattttttcattaaaagcaataggattgcacagtttatatgaaagactctgtgattgttatttccatctatggtgcgcgtaaccaagaaaagattaatgtaggcatgagaatgttggaaaagtctgtaattttgcagttaaaaatcagaatccttctatgtaatttacaaccacaatagatattttactggctattgttatccagaaaaagttatctttatggcacttcataaagtctgttatttatattacttttaccatgagcattaacagtaacctccactctgaattcttgctttatgggtcttggtacaatgattttccgccctgaggtcacattagaatttcctggggatctttaaaaagatactaatgcccagactccacccttgaacaaataaaactatcttctccacccttgaacaaataacacaatctttggggatggtacctgaatatctacattgtttaaagtagttctggtgattctaatgtgcagccaagactgagaaatattgtaagagccttaattcaataatgactattgcagctaagcaaccactgaaaaccatgccagttttgggaaggctagacagacaaaatagacgtatgtggagtgtgattacaaatgagatagatgtcatttgaacaaatagtagtgtaaaatataaagtattctgatactgttgatcaatactctattgatctgtattgttgaacaagagtattattaaacttgtagcactgattggtacagacaagactgtctgatagagaattatctcagtcaaaagaacagagcaaaatgcacacaataggacacactagtgaatgtaacagatgctggcttcatagaataagaacacagctactaggagaggtacaaaccatgggggagtgtctttgctgctgagctatattgtgtggagggagtataaataggacagttttagaagatgggtatcagccatactcaaactttttttcaaagctacttaataataaacaactgtttttatgtcttaccagatgactggtaatgtgccctagagtcctccttgtttttagggaaaacttaatggttaggaaatacctaacgagaaataaatgtccttttcttttatagtttctacagttcctgactcactttagattgactactggtgatcactaaaacgactataaatagcacagttttaactctaccttaatgggttctgttttgcagtaggtcatttattcatgaacttatcatttctacttcactcctaatgtgctcttctttgggtagttatctccattaaatcgtgtttatgagtcttttttagtccatgaaggattttcaaatcttgccataaactggggaaagttccatgtaaaagtggggtggaagtctgggcttcctgacagacttaatcctgctagttaagggggctctttgggataatatgggttccaatgagtcactaggccaaatcccaataaccgcagttgccaaaagtaattagactgaagaaagccaggctccttgggaggaaggtcatcacagcgagctttagccattgctccaacgtcagacctagttaattgtccctaaggatggagagcaatcatgagttccagagagtaggaaatataccagaaaacaatgctttttcactaatttttttcccaataggttatttaccataagcgtgcaagagatggaaatacgtcatcagtatgtgcagtttatgtcactatcctcataaaccaccttgtttgcctgtgtgaatgtacgtgcccacatagagaactcccaattcatcactacaagttctcctcctcccttcctgagtagataaagaactcaaagaatctagtctaagttcataaaagaaggtgtctgactagcatggaaatggaagggaaggaattcttgtaaacatccttaggtcaacttaaatatcatattattgaagtaacatttggcaacaagaaaatggtagtacattatatcagacaagcaattctaaaatatctggagctagaacaaacttatgatttcttgtactgaaaataattcactttagaaacatggtgttgtaagtatctaagtagaaattatcaacaagtaagtggtgctataattttaagctttcaatatttgagaaattaaaagattgttaaacctttccctaggaaaatactcaagtagcacaaaagtattcttgctcaatacccaaagtaaaaatttgcctttgaaaccattggcttggatacccagaaaagatactccatcactttatgtaacggatctttaattgaacaaagacactgtccttacagtggtaagtttcaaattcctttatggttcagaatgacttcagtatatttcagcactcttttgagcttagactaccagttctcagtttaaatatgtggatgagtgatattgcttattttaaatctacaaacaggaagtcaaactctttttctggccagctttttctggcaactggaaatctccaggtatcatctggcagacaaataaaccctgtccttgtgcactgcacacatctaatagttatcatgacctgattgtcactatggccaatattgtggaacaatgtatttaattttctttcatcttaaattgacaataagataaccaaagaatagaagaatcctaattttggaaaaacttagcaaaattttttgctgtgtttacttgtaccactggtcatgtagtttctgccataaaatacaaacggtatggacaaatgctgcttggccacaaactgaggacatactgagaagctacatatttgtttcttatagaatttagttttgtttttcaatttatgatgagtttttttttatatggagtccaaaaggaccctcgttgcttgtttggtaacaaggaacaaggtccaaacatggtatccttagcccctctgactttaattcacacactctcatttcatgccatcctcaagatggtaactctcagtcccctccacaaagactgaatataattttaaaaggacagtctttctttcatatagcacatttctaagacatccagccaactttccagttctatccagagcttaatgtagatccaagcttttaacacagatcagtgggatttccttggaggccagttaggcttgcagtatcacatagatgcatacttggccctagtacaatcaataacatttgctatcatatccagcctgtgtttttaaacctgtgggcattatgtgaccataccccaaagtttagtttctaacagaataagggagagttgcaggaagagaacctccaaacaatttcatgctataactaccatcttcagtatccatgtggacatcccattgacattccaggaattcattttaaactgtttgcctctgaactgagtatgtgctctaaggagagcctacgatccaagaaaccttcatgtaacagtttttacccaaactatttaattcacaagctgttgggctgaagtgctctaggtcatcagataagaacacattcaaatgaaaattgccaagattttccagtgcaggatattttcgtcacccttcctagctcaaactcacttcctcatccactccacaaattctaaaccactactaagatgagttgaacagtcttaattttataatcttccaaagaaaaaataaagacacagacagccgagttaatttataaaacagtgctgcatttatcttggcagatgtcagttttccccccactagctctttcatgctgactacttagcaactcatggaggatcaagtcattcctatgtatcaagcaccttgagaaccattgcactgaataagtttggtgtgtctcttcacacacttcttgtacaaatttctttcctcatagacaatttatttactgggtctctgaaacctaaataatccctttactttaaacctgaagcaaatggagagtcatttttacaagagcaataaactaaagtggctgttcaaacactttacttgaattgctctgggcactgaaatacctttttgttaatacaaacccttcatattctagcaggaaaacccctgaaattctagggttgcttaaaattgtgtaaccaggaatctcccctctcccccaacaccagccccctgatcctgggagtatgccagtaattttgcaggattcattctgacaaactgttctggtgtaaatgtttatagaaatcttttccactagagattaaacaaagtttaagtaactgtgcctaaatgatagatcttagtagtgtttgcaacagcaggtctgatgctatctgatgcaaagattctgatactgtatactagagaaaaggctaaaggaaaaagaatcaagagaggagttagtatgaactgtatgtaatttgaactgcaaaatattattctaagttatctctatacagattagtttttttaatgtgcacaggatataagggaaatgagttcatttaaattgaaaaatagtaaaaactgactactcgtgctttaatggcttaaaaaaaggtgggggcaattacaaatcttatcacatgccagttcaaatgcaattcttggctagttctccaaattctcaccaaaatgaagtaacatatctgagatctgatctgatgtaagctctggtatccatattattatgattcaaaaactactaaaagggataactgctgagctctaagccttatattgaatattatttattaaaacagggtagtaccctaggcctcaagaggtgaaagcaaaccagtgttccctttctgtgctttcctgtttgcacagcattttcaagtgtttattatatactaagggattacacagctaagcaattaaaaacctcagaaacttcattgactgaatttcaaattaatgctacagcattaatgattcctgtgatactagactaggaaaggcatatgtcatttagactagttaatgtttcctctttcccttgatgatttaaggcctaccttaaaatttaagaacccatgaatcttaatttcatttctttgttggtaagtcacaatatgagatttcttcttaatatctggagattacttcctcattacagacataggatttttttaattttaagatttttttgtgaaaaaccattttagaaaaagttcaatgtaaataatgttaaaacatatgcaatggaactttactcctttttgttttgcttcaaacgtaatggcagtcattcactgctaagtttccagttgaatcctatttaaatactgtatttgctataaatgagcaaggaaaataatcaaaagggatccatggaatatgaaatagagactttataaacttaattggaagataatcctgtctttctaattaccttcttagaatctagattttcttgatttgactgtagtgagaaaaatcccaccttaggaggcagggacattgattttaatttatatattgctatataatttagacaaatcatttagtctgtgatttgattgtatccactatacaaatgaattcataatctttcatttatctgaaagcagaaaactgatcttaaagtccactcctccaacagtaagatcaatgagctttcccttttcatttttgtagcatgctctaaccttagatagttgcccgtccaaatgtctagaatgctgagttatggctagaattcaaaagtttaagtttctttttgcacattcatggaagttttagaccatatttttaaaaagctaacaaggcaaaaaaggaatcttgttaggggaaaaatatggaaaaatcaaaattgaactcagcactaactacaatatcatacattcatttatttatttaatagctctttattaaacaattactatgtgccaaaattacgaaaatgagcaaaacacacctggaacttgcccttgtagtatttcacagtggttaaggaaagaaaatattaattcagattttaaaaaacaatatttggctaaagataaattagagcactttagatatcatttctaagccgaatagtacctcttttttgatttgtttaaatagcgttggaaattaattagtttacaatgaacctaatagctacccagatttttctctgggaaacagagacaaagctgaacaagaccacatatggggatgaagcaggaaggtggaaggaagattaactgaaaacatgggaatttattaggccttctggtattttcttgtcttaaaatttatgagcaatgaataggactcattacttagcatgccgtttgtgacaatcataggaagtatgctattgtccactttaaatgtagttagcatttttaagtaagccttgtaatggtgtggcatagcttggctgagtgaatttccatttttggcacattgactaatttctatagctgaactttcacaatagttcattaactggaattacttttcccaaacactaacatattgtatgttttaaaatagtgcattttttgtccatctctctgaagcattttcaaaccttttatggtaaccccatgaccaccacataaaacatacaagtcaatctacttaaagcaccagtttggcaaatatatgtcaacaagttatttggattcttatgtaactttgttgatgacctttcctaacctcagttgatagctttaaagatatcagttgccaaaattcagagtcttgaaaataacttgattcaattcttttcggtatgtgatcactgacttgtaaaggtctttaagtaaagaaaggctactaccagctacttccacatgtttatctcatggaaccttcacaacaatttcatgagatattattccattttataaataaagaaattgaggctgaaaacaactaaggaacagatcaaaatgacatagtcagagatggtaaacctaaactgtacatctagatcttctgacctaatgaatagctttcccaatacaccctgcttttcattaagcctgtaaaagagaatgccagaggaggtttaaatgagaaatagttatctttgcaactgagatggaactactaatacctcattagacaaaacgtgagggtgtgagaaaataaaccagactacttgacagaatggttacttaggaagtgccaggccaagttttttaactgtttttaaatcagaggcccaataagattgcaactattggccaggtgcggtggctcacgcctgtaatcccagcactttgggaggccaaggcgggcagattacgaggtcaagagatcgagaccatcatagccaacatggtgaaaccccgtctctactaaaaatataaaaaattagccgggtgtggtggcacatgcctgtagtcccagctacttgggaggctgaggcaggagaattgcttgaacccaggaggcagaggttgcagtgagccgaaatcgtgccactgcactccagcctggcaacagagtgagaatccataaaaaaaaaaaaaaaaaaaaaaaaatttacaactattgttcttaaaagatccctctgattggtaatggtagcagtagtagtagtaggaaatgggaagatgtgaactctattaataagggaggtagaatctgtaagaaaggtgattggagaagaggataaggagggctcctagatttctgattgtagcatcttcatggcgccatttgctgcaacagaaaagcacatgtcgattagatgtagtggctctcacaggtaatcccagcattttgggaggccaaggagggcaaatctcctgagtccaggagttcaagaccagcctgggcaacatggctaaaccctatctgtacaaaaaataccaaaattagccgggcatgatggctcaaacctgtagtctcagctactgtgggggctgaagtgagagtatcacttgaaccctggagtttgaggctggagtaagcagtaatcatgcctctgcactccagcctaagcaacaaactgagaccctgcctcaaaaaaaaaaaaaaaaaggcacatgtcaattaagtgtacaatagttttaatagctaggaagatttgtgtgaattatatatgcagcataaaccactcatgttactgaagaagataaagagagaccagagaagtaagtgacttaattgaagtcactttgcagtggagccaagagtagaaataactcctgtagccattctgtaataccaaatgctacacagcagatggttccaagggttgaccttccagagaagggctctatggatcctctgccaatctgatttcttatgtgtttaataatggccttcttggagagaattatctgttcattgactgaggagttgcttcacagtctctttatttccttactccaagatatgccaaactttaaaaagttacaataacctgttgccctaaagtaagatggctcatgacaaggcacaattttaaaaaacaaaccaattacacatgccgtactctcatcaaacacagttatccatttcctcatcaaacatattctattcctgggaatgaggaaggttcaaatctgatcctgagctggaaaagtatcattttgcccattatcagcaataacttatattaatatgattttgtacagcatatagacactttctcatcgtcttatttgatttttttctcaacacccttttggaatgggcagaacaggtgttatcatactcatttcacaattaaagctcaaagatggtaagtgatttgtatggtatcacaaggttggtaagttgcaaaacttagcctcaaaggtcttgtagggggatagttgttttgtttttctacagttctatgacttttcccacactaccacagttctcatatatctaccctgaagttcctactattagtataattcctttggatttgacaagaaaggcatgtatattagaggaaatctttattatagatgagagtcttactagctgacaatgtgaactggcagatctttaacgtcctgtcccatttgaatacccatgaatgagcttattgtggggagaaggagataccgaagcaagagcatcaagcattgtttggcaaactgtcttcaggaaaaagcagaaaacttgctgggtattctctatggtagtagaactttctgagagaaatggttgagttttgatataatgggatgtttattaataaatgtcattatgggctgggcacggtgactcatgcctgtaatccagcactttgggaggctgaggcaggtggatcacttgaggtcaggagttaaagaccagactggccaaatggtgaaaccacgtctttcctaaaaatataaaaattagtcagccatgttggtgtgaacctgtagtcccagctacttgggaggctgaggcaggcgaatctcttgaacccgggaggcagaggttgcagtgagcggagttggtgccactacactccaacctgggtgacagagagagactccatctcaataaataaataaataaatatcattataagataattgtatgggctttccccaagtatcatgatatttgttttactagacataatcaagtagactgttacaggaaagcagtttgaactagatacctctaaagttcccaaagtttatgattctattggctggaagctgactatatggatctcaatattctcatctgcaaatttaagggagaaggaagagcttcaagagccctttaaattccataggtaaattcaccatcctttcagatattatgtatgtattcctacataaagcattttgttcataacattttccctccttccccctttccatttgtctcagtttttcttttccttcaagttccataatcattcctatctgttctctgtagtctttagatatctcaattatcaataattgctcctgccttttaatttgcggcaaaaagtttctaatctatacatttatgggttttagaatattaaagtattatcttattaattgtattgtaggcttcttgagtcagagactatcttttgtctctcagtatgatcagtacctagaagactgcttccagtaatcattgaataaacaattatttgtgaagataataataatgtaatactgaaagtgtggtatttatatcaccttcgtcagattcacctgggatgcttcttatcaatgcagttacctaaatccactggattcacttccaaatcaaaatatttgggagtggcatcttacctcatcattgtaaacaagtaatccaggccatttttacacacagtaaagttttagaatctttagacctttggtttctctgtaccatatagacctttggtttctcggtaccatattgatatcatttctatgccatatcttacctttttcagtctgtttaagtaggtgtgtatcttcagtgagcagctagtgcctcagaggtcttcttgacccggatgtctgtgactcctattaaagtctgtgtctatggtacttaaaaagtagccactctatgactcttagtgagtttctggttccccaagcttctcacacctcctgtattagaagcctcagtatgtatcctcttttctaagagttattattggataaagctgccagctgcttcaaatatggatgatgataacacaggatgagtttagtgcctcttgagttaaacaaagtgtcttatacctatgattttgatgattgcctaagagagtcctaggcactttacacagcatctcacttaatcctctcaaatacatatcaagcagatattctggtgttacagatgaggaaacctaggctcaaaaaagttaaacaacttttgtctaaatatataatcagactggaaattcatttacacagataattggttatattcatctttgtatgctcacctactagaacactgtgtggatgttgaataatttaattttttaaatgaataactggataaaaaataaatattggtaactcagctagaaaacatgacaactagggttcaaaaccagactctaaatgagtgcagatccagtacctcttcaccctgtccctgtgctcttctgggaagtgtgcaggacccatttctgaatgaggtcacaatgcagggagccatgcacataagtataaagatgcatcatacttacaaaggtgcatgtatattcttcttcaattccgttagcaattggagccatgcacataagtataaagatgcatcatacttacaaaggtgcatgtatattcttcttcaattctgttagcaattttgtgaatctaggaaaaaaatcacttattttccttgctcagaattttatatgtgatacataaagctggagtttttaaaaatggtatactcactattggtacatcttctagtgcttgttgaaataccacaagtctctcacttgctgtttacttatgctaagacctcagccatcagatatgctactttagcatgctatgtagcacaaatatccaagtttattcacaatataacaaagtggagtttgtttttagcacaaactgaagtttgtttcattcaagaatgtgaagttagtagttatggagcactcatgcggattcattaccattaaactgtcacattttctgtttatgttgatttctaattatttctaaccttaaaaaaaatatatctttttttttaaggttagaaaaaaaatatttctaaccttaaaaaaaaatttctaattatttctaaccttaaaaaaaaatggaatgcttctctcagccagaccacagcacataatgattcccactgttggatgaacactgttggatctgtcttatgaaaaacgctgttattacctactaactcatcaataggtcctggctctacagaatctgggtctcatcaccctcatccaccccctcttgtcctctattcacctccacttgggaacatggccacttggagaaggggaagctttccctctcttagcaacagctggggatgttgattcagtaccttacattttacactcgtagcagagtgcattcactttacaaaggatttttctacttgcgattaggaaaaaaaaacacctctttatttttggttctgtgagtagtttgtaacagtttcaatagcagcatcaactgtagctagtcggttggtcacaggaaagttcatagggtttttactacttttgaagtatccaatttgaaattagtccatagatttttaattcatttaaggaattaaagaacataatattaagatactaaaagaaatattaaattagaagtaaaaagcacagtgttgttactctaagttatttagactgtttcaatatgcattgctaatggtaacaatttagaaaaatacaagaaaagattatatgcaagactgtaatttttttgctttttattctttctttgttcttatgacctttcatgtatttgataacttttttacttctccccacttattcccacacacacacttacacagaatgaaaattaaaatcccaaagcaaactaaaattactgctagagaaagatggggaggaacagaggagaaacgagatagtcccaagagcaaaacacatgtagattgatgcacagcctcttcaaagattggaatctggatgtaaatccccaagtttgttgctagttagaacattttcatctaatatacaagttaaaaagagaacatatcttcatggaatacaagatgctggttctgttccaagatccataaaattaacacaaattaaagtaactatatcagacaaaatgtgttgtttcctttccttctaatatttacttagaaatgcagaggctacatgtacttaggctttttactctggccctcaagggatgggaggatctggctccaaccaccctttgtaactcattttatagcactcaacgcattgcagcctcattggtacctgtcatgttgctccttgtgcccagcttctcccatggctttatactgtttgcattgctggtgctctacctgaaatactcttcctgggtttacataatgactcctccttattctgcaggcctcggctaaggagtagacttaaaggttcttccctgacatgtatttaaggaagtttcccagagttattctctgccttattcatctgtttgttgccttaacaacactcattacaatctttaatcatttgattccttgtttacttacttattaactgatgaacatcatgtcttcaggaactggatgtcttattcattcctgcctttcctgcatcacatgaaatgttgagcacactgtgggtgaaatttttgttgaaaaccttaatcatagtttccacagtgtatccatatacagtgaagcctacttgcatctatctttcatttctagtcctgattttggactagctgtggttaggcaaagcatagccttcagttaccaggttggctttgagctcccaaatattcatcatatcttagatttcatgaattctacagctaacatcatttgctagccattttcttaatattttgggctgacttgattttagtggaaagcctagctatttgctgcttaatgttaggtttgttttattgctgtggctttattttaaagtatttatagaatataaatattagactcccttcaggaaattattattcagtaagagaaaaagaaagattttccaagttctcaaagaaaccatttccattaaaaacagtatgtttccccacataataataatggtggcgcaccaactgggctgtattcagcagctggtgaagacattcctctctgagactcttaggaattctgtcaacctctggtgtaggcacagactttcagattagatgttgatttagtaggataaaagatacagtagactctattatcctagctgttaaagttcaattaatgtatgtacttttgagtttgacgaaagaccaatagaatttgtatgtaggtgtgtgtgtgcatgcatgggcatgcatgcgtgcatatatatatgtatatacacacatatatgtgtgtgtgtatccatatacacatgcgcagacatacaaacacatatgtgcacatatttaaatatgtatatttaaatagcataggtgaattttaatttacttaatggttaaaacattggtatattaaaaccctaaaaccatcagatgataaacagtatttcaaaaatggcagggtctgtatatatttggacatataaacatgtggttctttcaataagttatcaataaaaaataataatgaataaacctgtattcacccaaatatcatagtttgataatccaaaaggagtgttgtatccaaataagtaattatatttattcagaaaatcttgtgttcatattttgctatctatacctaactttctcaagttgcctaaatggttgtggagacctagccattgtcggctctacttgcaagctttaacacatgaacaaatgagaaacactgactctgaatattttcttgggttgactgggcagaattttagagagacagccaaataattcaaatttttaacattagacttttcttaaagtgatcgttgccaccagaggaatcgggaaacatctcttaattttcaataaatgtaatattactccaaacttaaatgtgacttcatactaatcaagtcccaagatatggtagaaatgtgttgtcctaatttaggcaagaaaaatcgccacattttctctaagggaatgaattactgaagtaaatgacacataagaaaaccattattacttcactttgaatgattgatttcataattaagcattcaaagtttatgtaatttgcaacatgatttctttgccagatattcataggcatagcccacttaaattgttatagatactttctgttaaacatttactactttaacatttttattattctttctttctggttgttttttttgtttgtttgtttgtttgtttttgtttttgtttttttttagacaaggtatctctctgtcatccaggctggagtgcaatggtacagtcttggctcactggagcctgggccttctgtgctcaaggatcctcccacctcagcctcctgagtagctgagaccacaggcatgtgtcaccgtgcccagctaattttttttttttttttggtagaaacagggttttgctgtgttgcccaggctagtctcaaactccttggctcaaggaaagtgctgggattacagttgtgagccactgtacctaacaacatatttatcattttttaaaaaaatagcttttttatatgtattgtgttcattccttcaataatcaaaaacactttattgagaacctattcaataaatagcttccttgaatagaaggtgggaattatctcaaattcctgaatctatagaggaaaaaagaagaagaaattatcaaaccatgagacctcttccctcaggaagcgtacagtcaatgtgagcacacttctaaaaagagaaggcatggaagaaaggacagatgtaaaaaaaactttgattatagaattcagttggtctcttctctctaccctgtctcttaaggccactgcatacagaaaaacaggcagtgaatgttgtgcagacaagtatgctttggagagattttatatatgatgtttttattgttgttaaaaataacttagatcaaatttgtgaatttattaatttttaattagattataaaatcattattacttttatgtatctggcacttcttttcaactcagtcaaacctgttttattagtctaaagtctactaaaatttacatttctggaaattagctacaaataaatgatcatcagcagtaattggcagcatgcaataatggatttttttcacataacaacttacaatagatgttagtacatttgtaactgagctttagaagtgaattaacgtaaagcaaatgcttgaagcttgcatttaaattgtcacagaaacagaatttagttcccaatactgtattagttgatacatcataaacattgaaaacaagtagccaaaggttgtatattgaccaagtgttctggttccatttaaaattctgtattctggatattttatcaaagttgaattaactcttatgataatagcaagtctcttaggaatggttgcatcagttatgtatcacaagttaaaggttatcaaatagtaggaagccttcttaacagatagtgaaattgaagttttttactcagggaatgttgacagttcagacactgaaagtaggtttaagttatgtatcagtgtacaccctttttgtacaactaaccataataaacaagttaagaaataatagttccctctttcttaattctaaagatagacatattaatttcactgtgtatgtgacacatttttagtagaaagtcccaatttaaagtttccatgaattctgcccattttcccactcatatctacccccattacacatctaaagtttacttatatataaagatatagttaccagatatcaaagatctctattttcacctctgatctaaactcactatttttccagcaggctattcctttgagttcaagtttgaagtttcaaaataaatgattatgatagcttctacttacttgtatcataaggcaattaccacagttaatttagcttttgaatatgctctgaaagcaacagtgagtgacctagaaattcaaagtattgtttaaagctgcttataatacattttgttctcttaccaaatgtcccctattttgcatgatgtcttctttttctgtaatttttcagtagcttccccttgttttttttttttttttttttttttttttcagacagagtctcactctgtcacccaggctggagtggaatggtgcaatctgcgctcactttaacctccaactcccaggctcaagcagttacggtagctgggattacagacgtgcaccaccacactgggctaatttttgtattgttagtagagacggagtttcaccatgttagccaggctggtctcaaactcctggcctcatgtgatcagcccaccttggcctcccaaaatgctgggattagaggcgtgagccaccgtgccaggcccagtagctcccatggcttttctaattaagtagccaccatcagagactcatgtgtgcatctccaacagccactccaaagtaagctccatctattaagcatcactctctggatatttcataaaatctgcaaaattaatgattccaagccaggtttatctttttaaacgtcagtattctatgcaccatgccctactctccaactgcaggcttttactcccctggtagcccctcccctctctattcactggctggacctagaaacccaccttttcaaatcctctttcttgttcagcctacatgccattggccactatatttggttggtaccacctcctaaatatccttgaaacatgcatcccttcctcactacattatattgcctctgccgtactttaagttatcatcagcctcttaccttgactactacattattcttctcctagtttgcatgcctgccacactgccagggaaatttcctttccaattcaaatcttaaatttcaatcactggtgtgattgaaacaccctatgtttacagaagaatttcattggcctatctcacaaaagtttctgtaatctagatctattttatacttccaatcttcttgttattccttatatcttcattccccactacttatgcaccagttgcatcaaactcatgccagtctccttcccagcttgggtcactgtagtgtttccttctctagccaaacatggccacttacatactcataaactccaactcattttctaagattaagttcaaacactgagattctgtgaaactttccctacctctccaccaacaacttcaaataatagtaggaaaatattgtttgaaaaaggtgatttagaaattcaaaatgaagttaatattgaatggggaataaaaagaaagacacatgagaaagtaaaattctattttctgtctcagaatcacaagattttatggctgaaagtgttgttacagtcaatatagaccaaagttttttgtggtttccatataaaaagtaaaatctcttgccttaaaatgaagtttgggaaatttgtacttagttgtgtaatactgactgtgtaatttgtatgatccttatacggcattcaagaaagctgtcactacactacataaccataaaaaaaatctagactcattgaatctgagcttcatagtcttcatttctctctcttcccacagccagcatttaaaccttcctgaagaaataaggtttgccatcatttgatattcaaaattcattgccatattcaaaattcactgattaaaacataaaattttattgcaagttgggacaactaggtctttcttgctttttcaaaaatcaaatttttaaaaacccttgcctaggaagtcattatatgaaaaaaaaaaggtaaaaagaattattgtagcacaatgttgactgtgctccatttcatcagtaaaagttttagagacagagggaatcaagcaaggtattttggcacatctcataatttcagtggatacagttacaatcatgagacttattcaaagctctctcctgaagaacattccaaacattcaaaacctagtttttaaaataaaatttatcttaaggaatgtcagtttttgaagctctgaatatgtaaatcatgtttatattaataattgatatatttaaaattatatcataattggcaaaagtttcagaatacataaaattagaattttgtgttttctttcagcagccacatttcagagatagggatggattggcatggaccaatatggtccatctttcttaaacccagagtctcttagtgccctgagtttgaagcacttttctttcaagttgaggtccactcttctatagacaattctatgaaaaggtcttacaagtttttatctacacctctcgcttcttgaaatggataatgatagattccaaacacatggaaatctcttgccccttttactttttaggatctttgcaagcttacaatatgtacacgttttctgtaagtcaccaatgctgagttactggcatgaaaaatgaccctgttacttggaaagtagtttcacttacaagtcccccaggccctgtaatgtctaaacctcctgtgccactttatgtgactaccccgcccccacagaggagcatgcacaggaaaagcagacttcccttcccccacacatttccttagtttatttacaaaacgtcttggaatgagaatgagctgcttgtggttcctgtggctgattcagggatggtttcctacaggcagaggatgctggtcaaccgaatgacctctctgtaactaacccgtgcacccctgtggtaaggctgtttggtcttataggtacctcttctaactaagcttggagggatttgtttttgtggtaaagaacttagtaataaccaaacgtcactgtaaagacagatttaataatgttaaggtccatcagagcctactccttctactaccaacaagagaagccagaaatacactgggatgcctttagattcctgtgcatcaatctttctttctctaaggattatggtttttttttcttctggcatcttcaaaggacaataaagctattagcaatatatttgagtggagaacacattaggaaaagaaatcatcctaaacaccagctatatgagaaacatccgttagtcagtagtttttaccagctcatgcagaggtgatgatgactatttaatagtcaaaagaagatttaaagttgtgatgatcttaagcaaacatgagtctcccaaatattcatttctgtttgttcagacttgctaatgaacactcttaactcacacactggtaactcttggaaaccctggaatatgtgtaacagtgattcttaaggtagactggtccattctcaccaaatatacatttcactcgagtaagtagaagataagggcacagaaactgtaagactccagttccaaaagagaaaatattgaacataaattaccataagtagtcatatatgatccacatggaaacactggtgagataagcatcacattttcaccattatatctatttgaactggcaattattaagctcgtgtgagaagaaatatttaatgaaggaattctggggagctcaacagctaacatagcttcagcatcagtttgcattggatcaaaaagtaaaattgtgttctctaatacaccatagttcaaaacagatataaaacttagtgtccttactcaagttaagccctaatgtacattattttacttactgaagaaattagaaacatatgcttatcctccattacataaatgaaaagcaaagcaaatgtgtattaatttcactgtgtaaatgagcacaaaattaccagtccccaatctcccagggtgctagttcagtgaggatattatatatatgaagagaatatatataattagttatacataatttaaaaatatatattatatgataaagagactatgtatacacacacatatataagtcctttgaggcagtatattctttatttttcaaatgctcaattttaagaactttgaaattaaaaacaatacatgtgctaaagggaaataaaagatcataaaaaaagataggaaaaaaaatcccacctcattcacccattaccaacaaattgaaagctaatgaaagagaacatatatcctgcccagaaaatgtcatttttttatctgtgatttaacctttgtaatgtctttctacatttgtctccacagtgcatcctaacgttagtcaaggctgccaaggaggctgtgcaacatgctcagattacaatggatgtttgtcatgtaagcccagactattttttgctctggaaagaattggcatgaagcagattggagtatgtctctcttcatgtccaagtggatattatggaactcgatatccagatataaataagtgtacaagtaagtgcccacacgaaattgtatttttatctcatctttggtgacttttccagattgaagtggtctgtggggatatttgtgatattcagtgttaagtaaatgataatgtttatctgataattaggctaaaccatacttggacttaaccctgagaaccagaaaatttttatcactaacttacaaaaaagcactcatgttttggttttctttttaattatgaaagcaaaggctgggaatatgattattggtgattgaacctatagaaaagtactgcaagcctcaattccatctgagtttccattatcaacacaaaatccaagtattgactaacttgccaaatcatttcagctattttgacttcaagagagattccagagcaactgaaacatttatttatcaattggaaataaatattgggagtactgtcatctggaacctgaaaacctgtttttcacactgcagacccagggacctttctcaaaaatgtaaattaggaaataccactctattcaaataccatatgtagttcctccaaactcatctcctacaactccccctcacccattttgcaccagcctcacttcccttctcataagatcttcccacctcaagcctttgcaattgtgttctacactggctgttctagcagttggaaagctttttgtccacatctttgcatagctggctgtcttatatcattgatgattttgctcatatgtcaccttctcagagagacattccatgatcatcctatccaaaataatcagcctgttccccttgtcaaccaccctccatctctttttcccaccatttgctgttgtttttttgttttgttttccagagcacttatcactctggaactagactgcctggtttcaaaaagcagtctgatctgttgtcctgggttagttttataacttttgtgagcctcagtttccttatatgtaaaatgaaattataccaatgactacctcattggattgttgtaaactttaaataacttaataatattgtaaagcattatagcaatcctggcttacagtaatcaccacataagggtgaactattgttattgtttactgtatctcctctcctagggatgtaaactttctgaagcctgactcttacccctcttgtgcattgctgtcaaccaatataaaaaacaatgcctggcacatagtaggcaatcaaatatttgttgtaagaatcaatagccctcaagaacaacacaaagataatatcctttgtatgttttcttaaggttctgatgaaacattttcactatcacttaatataaacagatacttcatcttataaatattcttggagatatatatatatatatatatatacacacacacaaagttttttcatagggcaatcagtacaatgattttaaaatcaataaccaatgtacctcaactaaatcactgtggaggaatcgtgaattcagtctggcaaaataattttggacttcaggtgtttatttgatactaaagttgtgtgtggctgtgtctgacacatgtagaactggaccaatagttaagagaacataatgcaagcatatttctttcttttttctctttcagaatgcaaagctgactgtgatacctgtttcaacaaaaatttctgcacaaaatgtaaaagtggattttacttacaccttggaaagtgccttgacaattgcccagaagggttggaagccaacaaccatactatggagtgtgtcagtattggtaaggagaacctgtaataatttgagtaagtgataatgtcagtctccatggaggtgcttttcaaagtcctttgccaaaagaacttgaaggttcttgggctgagatctcttaaaggctgtctccatccttctttacaaagatactctcttaaaggtgtttttcataaccttatctagtatgtattatggtacaatttaatacagtaggtgcttccttatttcttagggactattgataatcgtttcaaccattctgtttatgatagatttatttttattatttagtgaatttttatttaattatttaatgaattttatttaagtaaacattcagccaagacacacatatgtatatctgacagtgatctgttatgtgacatacatatatgtcttgaacttaatttttaccttagagcaacagtttcataaaacacctaggtctaatctcaactaatgaccaaagttattttccaaggtgggaacatatattctcttgacacagcccattaatgctcagtaaatggatcaaagacctagagaactggaattgatttagttaaaatctcactctttttctctcatactgctatgctgaagtattctgcttgcacaggtattgatacataataaaaaggattgtggacttactcaaactgacagattgagacagtccctggggctgattaattgcaggccaaatttcctgaaggggaggtccctcagacaagttgtttgtctaagtaacagatcactgtcaggctgtattttcaatcttttaaacgttgtgcagctactacagctacaactttgatgaacacttgggaagcagatgctgaaccaaatggtaaaatagcctaggaaatctcaaaatcccctgggcaagaactacaggaacctttgatgctgcggtgatgttggcatatccacacaactgccctcctgattcagtacaagatagtctccaggactcccctggagtccccatcttaggggtcccttagaatctaaagggctggagtaataactctaaagtgatggtttaaccatttcaagtgtaccgtagcacttttatttctaaacaatgttcttgatagaataaaataaatagatattttaaagataattttagaagcatctggaaaacaacagtcttgaaacagttcgtggctcattttggttaagtttttcttctctagttgtaaaaacacatggaaaaaaaagcaacttaggaatagggtaaaaagtacaaaagaaagcacttcaagttctttttcttataggtcctgagggctgatgattagaggtaataagttccaaacactggaaaaaatagaaaacacgtctgtggaatattcaagagcagaaattcaggatgagttgcagaatgtttgtgacatttctctacccagaaaaaaggcacatatttagattttttcagttgttgaaggtgtaacattcagtcctggaaaggctatttaccttaaatgtattaatgcttttctgtcagggagatcatttcacacttggcactattggatttgcctttaaagcttactggtaatttatgctgctagtaagactaagactatttatttcttaacacaactacatttaagtttatatattttggaaaagaggttagcagtccaaaggccaattactgagtttggttcatttaacagatgcaaatgacctaggacactgtagtaacacaaatcaccaactttcattcagggctggctccggttgtttgctcaataagagatgtctcccatcatatggcgcctagcctgcaggtactacacctgccatgcctttaggccagtccagaatttcagggaagatgatgacctgcttctatatcacaaaggaatattaaagcctgttcctttaacaaatatgaaaactaggatccggagagccaaaatggtgatcccaaagaaacattttaagttattttcagtgctgtaattagtagcctgactttagcttcccactactcatccaatagaaagaatgtgtctttctcattgctaaaatccacaccgtatttctacttttctatcgagattttaaattgagaggaaaggtcataaacagaggaaatgctaccctgatatagagctgggatgaaagaggtatgtcacagtgtatctgctttccatggtttgcaggtgaaatgaaacagaaacatccactgaaccaaattttataagagaacatattcttttcactttgtgctccagatatttgcttcctttctgcactgtcattttgtcaccctcactgcttctcttagttggatttgttcaagaaacacagagagaatatatctcacttcaaggactgagtagcaagggacattcccttgctatgttctctatggaaccatgcaactagtcaacaagaattagagcaaaatgaccagtaaagtcactactaataggacatcctattcaactttcttgccaattcgggaatcccttttacagcatcttgcactgatgatcaaccacagcacaatcattcccagggaccggagctcattacctttatgagacatgtgcttcatttgcttcattagtgaatagctaaagatttccagttttaagattgttcttaatacagaagctaggaggaacacagaaggtgaatattctgtttttccttaactatctcttaaccaaggagtgcctcaattctacattgttcattaaatgatctgaatagaacctaaatcacctttgtgttgtctttagcacttttttttttcagttttcattttttttagtggaaatattatttggatgctaacattataggtttattctacagtgtttctctaagataaattcacctcatttcatggtgttttaactctctggtctcattagaactttttactacctaaactcattagttttgaatattttccctcctccaatgaaactatctaaggttgtccttagaatttaatttataaaacctttcatcttctgactataaactaataattacctaagctgtaattttttaaatacgtttttctaatgtccaagtgtacatttgcttagaccacttttgctattatgaaagagcaccgaagttctggtcacttgcacatcagatcattttttctaattcagtcctcttaattctggaattaaatgaatactggacaaagtgacagctcacaaacatagactttcctcttctcatttgcttttttggaggtgcctttttttgtaatcctaaggatacactactttttaatgattaatatcagaatgggatgctggaagataatatccataaccagcaagagattataatattattaattgacttagttactctattcttgaatgaaaattgtagtggtataactgagcatgaagactattttaaaatggttcaataaagttcatttcatttcacagaaacataaagtcatgtatttaatcaattccatttaattccgtgttgcactcagggacctgaaagtgtctgaaaagtcctgtgaaaaatgtataataaatggatttaaatttctaaaacatttaagttatctttcagcctctgctgttatgagatagcattctgctctaaagtaaggaatcattaaatcagaaggcaataagggaggttactggaaacttctttttgtggaaagatagtcttaaatcatctgaaagagttactgttgctagctgttgctatacattagaaagttttagggacataaatataatagcaccttgagatgtttcttttctttagaagttcaaaaatctgttacaacctgagaaagccgttattgaaaaaaagaaactaatacagaaaaaggaaacaaatctccaaaagaagcttcagaaaaagtacatcaggtcatcttaggaatcacttggtcaggttaattttagaagcaggttatcagctgaaattgacccagaattcacatataatagatgccgctatgcctgaaccatactcagtaacagatatcaatatttaagcgtacaacagcacatgtcgtaagcaaaggcagtaaatagtaggccaaagacctggattcattttctgctcaagcattctctaacacagaggttctcaaaaggagttcccagtacctgcaaatcagcattacctgtattgttaggcaaattcacagccctgccccagataactgaatcagaaactctggtgggggctaatggagaaaggtccagaattttttgttttagcaagccctccaagtgattctgatgcatgctaaagtttgagaatcaattctctagcacatagtataacaactgttcttcaaattctggtcaggatcaatcaacaattgcagcagtgctctggaaattataaagaattgatcaattttagtgattatattaatgttagtgcctgtgttaatcaatctagagaaaaaggaaatccaatgcaaaaatgagtttacctgataatgagtactaaactgaaaacattcaatttctgcctttcccattctcctgttttatatttaagtcatcttgcccgactttgatctgcaagattcttctcaaatgtgggcaagttctgatggaagcaaatctttttttaactcaacaatagtgaaagtggttgtaagccagctgagtctgtttcttctgttctgtttcagtgcactgtgaggtcagtgaatggaatccttggagtccatgcacgaagaagggaaaaacatgtggcttcaaaagagggactgaaacacgggtccgagaaataatacagcatccttcagcaaagggtaacctatgtcccccaacaaatgagacaagaaagtgtacagtgcaaaggaagaagtgtcagaagggagaacgaggtacaatcataataacaaaatgtgcttgtttgaatcctcataatctgttgcatttttcattttatttcttatgaaacacttggcattatctttcatgcctaatatcctaaaatgtgtaccaagcaagaatatgttgcttgtaaattacagaatatagatgtggtaattccaaaatatggagcctgatgtcagaactttactatagaagtgtgctaattgaattatgatgaactaggctgtattgtaagcattcagggcattatctgtactataatctgctttgctagtacttagaaaacttttgggaagtctcataattacaaagtctaatgatatttacaagaacaagacaaagaaacaccgccatcaaacattcctttcctcactgcctgcaaaccaaagtagtgaaatgtagtggtaagcttttgtagctaagtgtatatatatatatatacacacacacacacatatatataaaattaaagacagaatatcattctgtcatccaggctgtattgtagtggtgccatcgcagttcactgcaacctcaaactcccaggctcaagcaatcatcccacctcagcctcccaaaatgctgggattacaagcgtgagccgccatacctggccagtatagttaatactgactttattttgaaatgaccaagaccacattttatgaatatagcaaaatcattaacgacatttgtctccagatttcttttcatattgcatatttcttttcatatttcttttcatatctgtctccagatatcttttcatattgatttcttttcatattctggtctttatagaccagattacagaacctattccatcaatattaactattagaatttgctgtgaaatcaacaaggagaaatatagcatttaataatatgatcctttagggtgaataaacttccagccagaagaccctcagttgccgatctttaaaatatcatttttctatctttctcactaatgtattcagcaccacttcctacaaatatgttgtgtagttttatgtaactattggtagttatctggtgagtctataaatgatcttctcaattaattccaaaggagtttgattgcctctgtagttgacctttcttatttctccatagttgacctttattaggttatttcattcatttactagcttatttcattcatttattcattcaacatagttttattatattcttactttatggctatgcactgtactagggcctaaggattcacaactgaatggggtactgtctctctattgtgaaggtacaccagagtccagtgaaaggttgagatgtttaaacagataatcacaacatcgtagaataagggagattatagatgtgtgaactagtttaaagggaacacagaagaggacactgcaaacttgaacattgcttatacaaaagagaatttgggtcacctgtactttgcaaagaaacatccattatgccaaaagaattggccatcactaaaagctataaaacctgtttctgccattctaatcaagtagttaatgtgaaaaaattcttgaagacatgggttatttaaagagaacttcaaacttttgtaaatttgtaggaggttttgattaaaacttagtttaaggaatgaaagctggctagtgaaaaaggccttttggcatttgttaccaattaatttaaaacatcttagattttaaaagttggatttggaagtcaaatatttcatcactctacttgttggtatgctcctgttgccgtacatttacttatgtttactaaatttccttaaaatttaatgacttacaggtggtctttgctcatatcattcttttcacaaagattgtacgttattaatcagtattcagtacacattccttttaaaatataaatgaagaaaagttatccaatagcagaattaaatcacgattctaattacattttatttcttttacttgagaatgtgatctttcaatagattatattttggtagcacttgacttaaacattaacattgaaaatgtcaactgttaaaactggcatttatctcatctagaaagagataaaataaacaacatcacaagaagtttgaaatagtaacctgtgacataagatttagcttaaaagtgtctttctgatttgttttcttcccctctgaggatacagtgacattttacatttacaaagagaagtttatacaactagaaaatgtaggtgttttattttttcaaatttcataaaatgtagactaacaagtggcaaatatgaatcacatttacaattaatttccagatttagtcctacttttattttttttcatttatttttcaaggtgtttgtcaaaaacttttcttaagtagcctataaactacaggtaggaagaaaatcatttctctctttgttatttctctaatcctccagttttcttaacttctcttaaggtttagttagcaagtatcctatttgaacacaaaccaaatagaaaagtaatagtgacctctggacatcccaccgtatcctctctatcaagcatcatatcaaaataataacatccagagtcttcatttaggctctactgtatatttatataatatgtataatatataataaaaatatcttgaaaattactcattgtcttgaatttataacctaaatgataagaaccccacatacacatatagagaagcatatcaacagagcaaatttagtagaggactttatctttatatttttctataaaagttgggcatttcttattttaagtagggtaagnnnnnnnnnnnnnnnnnnnnnnnnnnnnnnnnnnnnnnnnnnnnnnnnnnnnnnnnnnnnnnnnnnnnnnnnnnnnnnnnnnnnnnnnnnnnnnnnnnnnnnnnnnnnnnnnnnnnnnnnnnnncctcacacttaggatagctattatttgagttgctcccagatgtttatggattaataaaataagaagattcctttaggttcacagcttgagcatttcaagatgagtgtactaaaagataaggcttttcttatgaatttaaagttaggtctatgatccctgcctaagaggttaacaatagacagaggtagataactcatatttggaaaaggtagggagcatgtgttcaggattttttctgctctgttgaaattgccaaaggcaagatctccagggaagaatgataagatccagaaatgacttttcaaaatgtacacaaagaagaagttgaatagaagaaaatagtttgtaggaacagagtggattcatctagttgggagatgctttttaatatgtatatgttacaaaatcttacacacacacatttttctttactaccattttctcatggttagaataagttaacccaaggagataaatttaattgttgtatccttacatttaaattatctcatgtatttgtttacagtatttcagattattcccctttacttgacatgctaccttttaatcagcctgaacttctccatcaattactaactttagtaagaggtcattaccaatacaattctttctagcttgaacttaattgaattatatatttgaaatatcaaaaatatagattttaagagattatacagactaatatataaactattatcacatgtgtattgaaacatcatatttaagtagaagtaaacaaggagaaaatgcatttccagtggttgccaggttttatttattgacttttttgacatacagtgtataaccatctcagataaggaaaactgaaacagctcaggaagatgtgtgtgcacctgcatttgatgcaaaagggtatatttgtgtatgtggtggtggaagcagagtcaacaaacacatttttcattcatttgtaccttcctctaattaactaaagagaatttcctatagatggtttttaaggcaactcaccaagaataaaagaaattttgttctttggttagttttacaaaaaagattcttattaatcacagatagtgtatgatcttgggatagaaaggagagagaagagcagagcatgttgctggaagaagtgaggtggaggtctatcttcctggtataaagacaagctagcattcattccaccagagaaatataaaaggaaccctttaaaatagaaagaaataaaatgtttagggacactccagggaagaaacaaatgtgggaatcattgtattactgtactatttgagtatactgtaggttgccttatgtactttctcaaaattaagtatagtaaaagtctaccaggcattatataaaggcattacatacattctccttttttttttttttttttttttgagatggggtctcactctgtcgcccaggctggagtgcagtggcgcgatctcggctcactgcaacctctgcctcctgagttcaagcgattctcctgtctcagtctcctgagtagctgggattacaggcacacgctgccacacctggctaattttttgtattttagtagacacggggtttcactgtgttggccaggctggtctcgaactcctgagctcaggcaatccaactgcctcagcctcccgaagtgctgggattacaggcatgagccaccatgcctggctgaatgtattctctcttaaaggctaagccacgttttcaatttaatgtcctcagtggacaggccttccagttgctgaatcactatttagctttccctccactaaaattaattatatggctataatcatttctttttcataatactctcctatctattcagttgaactgtttgcaaccgccttttttgtaggtcgtaaatggtcaaatgtaagcagtttcatatggttcaacctgatactttaaaatttcatctctctaaactgatcaagttttagaaccagacctacagtatgtttcttatggattgacagtttacaatttgtatatactacaatctgttttaaatattaagcttttaataatagtaaactgtacagctgtccttgaaagaatgtaggcactaccaatgcagtgaagaggaccctgaaaagtggggcttaggctgggagggttcttggcttagcccagaaaagaattcaagggtaagccagtggtgttcaacagcaacttttattgaagcagcagtgtacagcagcagcagaggtactgctccttatggagcagggataccccataggcattgtgccctgagtaccatctcagaggaagttctgcagtcacatttatacccacttttaattagatgcaaattaaggggcacattatgcagaaatttctaggagaagggtggtaacttctacgtcattgggttgttgctatggaaaggggtggtaacttctgggtgttgccatggcaatggcaaactgacatggcacattggtgggtgtgtcttttagaaaggtgcttccactccatgcctgttttaattagtcctcaatttggtctggtgtctgaaccctgcctccagagtcaagtctcactttgtgagtcaagccctacctcctacctcactactcatctttaaagtctctcataaaaacatgtttggtcttcagatgctctttaatcatggtcacatatgacttattctctgtttttatttgatatttttttctccttagctatattactcaacccttattccttttttttttctttcccaccacctccaatttaatcactgaaacatcaaatcaccttgtaaattcagtggacaagtatcagaatttattatccatgtaggtgaaaacatttaatgcctcagtgataggccccacctcttattgtttcctctggcattgacattataatagcaggatctatgtgaggattctttgttgcctaggtttttgggttgaagacatgcacaattgactcccctgtgtcataatgaagcagcagaattacagccagcaccttgatagatatagaaaaaaaaatgaaatgacagtttttaagtttcttgcctctaacacattttacatcctattgtatgttcttaaacttctcaatattaaagaaaaagctctgcagaaaataagaagactttatttcatgccttgcattccttgatattatatcattttttagaactcagccagcagttactacctcttacaattcagaccaagtttgctccataccatttttgtaggctctctgagattttggggattttattaacggtggtcgaaaatcatggtggacattattcacagtgggaaatacttaattgttattatcatccatgcaatcccttcattcctatgatagtataagaattatttgtaggcttttctgctaattggtgtgtacctcagcattcctattctaaaataaactttgtaataaatgacccttgaaaatgcctatattctctgagatttcacttagtgatatttataaatatttagtgctttgtgacccattggtgagtgtgacataatacacagtgatcaggttattgaatagagtggtagcattcttcagctcctaagcaaacaatgatcttgccattgtttaggtctggtgcacgaggattgtttcagttagcttttgctgcataacaaataacctcaaaacataaaggcttaaaacaacaaccacttacttaacaatttgtggctgggcaattaaggctgagacctactgggcaattttgatcttggctgggctctgtcacattgttggatggctggagaatgaggaaattgccatgtttctattatcatcaagatggcaagaggtcctacagccttccaaagtagaaaaggtgaagtcattcctcttgaggctaggctcagaacctggcatagtttctacttccaccacattctgtcagcctatactagtcataagcctagtcctgattcaagagttgaagaaacagattttatctcttggcaggagaaggtgcaaacttactttgcaaggtggcatgcatatacagggtgggagaggagaattatagccatttttgcattctaccctagaggtctttctcttgtttgtagttagattagtgtgattcctcattcacttaacaatctcttattgtctgaaatacagtaagagatttgtatttcctttgtaaatttccttccttcctttgtaaaaacagtcaactattgatacaggagatgttgtgttggatattatttctattgtactttctaatttgtaaagggcagaacaggaagaataaataaaatctgaggccaagataccttcatacgctcaacaaatatttattaaacttccaccatgtgctgggcactcttaggtgctgaggataaagcagtacaccaaaaagacaaaattcttttcatcatagatcttatattccgaatggtttatatcagtccacaaggtaatgaccatagagtatcagcccttttgtaagcatacacctttgttaacagttttcacctttgtgatttgtaccaccagtagctgctgtcttcattagagtttcctaacacattacaaagacatttgttaatgctggcaaaaatgaaacttctctgcttacatttcattttggtctcaatgtgaatacatgtattttttctgtgaccaccatgttgatgtgctaatatgtttttgtaagacggctaagtagggttaaaggtacagcttgtggttgtggaacaatgctgagttaaccggccctttggagaaatgaccccaagaccttggcttcctttacagcctgttctagccaactgagatccctgccaattaggagggttccctagagagagactccgagagcatcagcataaatttaaattctggacccccaaatgtagtttccaaaagaagcttcttgtcctttgctaattgcaaagtaaatatttctccagcaaaaagacactccctcctttcatgctcctgttctccttcccatctccctaatacagtcactccttaaaactgctagtgttgccgaaacctctttgacataggggacaccccacatttgaaggcacaaagaattattctttccatagataattatcttgctttttatatcctccagcagcttcttcatagaagcattacagactaactttgtagatgtcatagtctgcagaaaggagttgatgccttatccttgggcctctcaagaggtgtgagtaagtaggctattattagcatgacaaaatgtatagaaatgaaaattcttcaaaacctcttaatccactttgttctcactctcttctacatgcccttctctttctatttaatttcctactcagttccttacctttcatttaaaacatcccatttctcaggtcccaaattagaaatactttcctaaaatttttctgtttttcagtttctctaaaaaattatttacgacatacttattactttaatagcaaaataatatattagcatgttatctctcaatgatagtcctttttcaccaagctcactgttctgccctctgtattctgcaggacattgtagttgaaaatgacagatctcaaattatcttaggcaagaagaaaattattggcttaaacgcagactgcactaagtcctcaaacaatatcactttatcacaatatcactgcatcgccttctgctctctccctttctcaccatttcagctcacactgccttcattcctcattgtttgtcggccttattctcctctgctgcagagtctttctccatttaggaggaaagctggctctgggcagctccaagtctatatatccacattgctccaaataaaaaaggatagtgctctcgctctctctttcagtatccctgcatccaatctcacgaaaggattccaatggaccctactttgaatcactgtggcagaggaattggggtcctgagattggtctgtgtaagtaaaatgcctgcagttgaagccagggtcaagtgagccattttgattgctggctctgtttagaaaacaagggtactgacaaaaacacaacagatgtaaatcatctcccatctctccccaccaaacaagaaacaaaacttaccaaatctagaaacgtatgtttttctacaagataatcccttttcaatactggttttgaaaataattttaagtgaggaagagtaaccaaagttttttctgtctatttcagactaaacacacgttcaggataatgctaagaatattttaactatttttttctagtttctctgcatttgctagaaactttttttttgggagtaaactggctttaaatgaatagaaaaaataatctactatgcatatgaatggtttctggaattgaattgtgcaggcttaagtaaagacatgtccatgtccatttctagctgctgagggttctgtgtgaaatgcaccagtgtgggcaatgaccttttgcttgattatgcacaaggccactgaaacgttaaaattaactctaacctaattactgaactgcggtgtttatattgtgtatacaccaccaggtcataactctagcctctgtgagccccagctgccataattgagaaatatgccttgcaaatggttgttttgtttacttgttttttctgctggaagagcttgcttttcctatttttgcaaagaaacagatgtagggaagagtttctgaataaagtttaattacattttatatctcaatgcaaaacatgtacatctgtaagtgagatattccttttacttttgcgttacataaaatgtaatatctgaaagcacaatgccacttactattcacttttttgagtaatagcacattttaggtaaggaaatatcaatatactaaattcacatgcagaaaatatgaatagttgctaattccaaaaataaaagatatagaaaatatgtgcatacttaggatcaagagttaatatctaattaattataactcatgaacaaaaattattgtcttcacagaaataagaacctaggttttcataatgtaattagtagaatacaatttagatggctaattatttcttatggaatatgtacatatgatagtaaaatatttctcagaataataagtacaattgtaaacatctgctatgctgcttatctgttttccagccaacagcaaaatcatgaagggattttgttttatttcaaatttggtttgtctcaacagctaagatacagttactaaagtatttcattggcaaacctgtagtggcttcacatttgtctagtttgtcaaggtcttgaaatgtataagacaagggagtttttaaatttaacttctctccatcagtcccttggctttctaccatgttttataccttttatgcccttcctcctaccttgtcaccctttccttccatctcagcagatttcttcaattttgaattaaaattatctgctcatagaataactgtttcttctcatgttcatcatcttcaaaaactaatatttaatatttgcagtgtcagcctagtgaactaagaaagtattgaaatagtttaaaaaccagaaccatctcagttaagctacagatttgttatttgttttattcatttctttgtttggcttacacaaaagctgtatttttaatatcaataatgatgtgcatgctcttgtaaaaacacaaaagcctaaaagatacataaataaaaaattaataatctcactctccctcagtccagtccttcctctgagaaaagcaatgtgaaagtgggttgtatattcttccacattaatcttctgcttatagaaatagacatataaaaaatttccatagagaatgaatatattattttctttataaaaagcatttgacttttctttctgtgtctacagaaaaagaataaattgtgcaccttagtagctcaatagtgtgtgcatgtttacttgtgtcattttaaaatttgcatatcatggacgtctttctaattcatctttttaatagctgcaaaatgttacatgctatgaatatcacataatgtattcaaccattctgctattgatggattgtaaaattgtttcccatttttttgctcttcttactgtaacaaaaatctctatcatgttaatgaattgatacattgactttctatcagaggaaaaggaggtgatgcatcttagaatttagagcacaggctttggaaccatgtggtttcaaatttcagttgtgctttttaactatcgctatgactttaagcaaattctttagcctttacatatcccatttttcctcatctgtacaatggggatgataacactaactacattacaaagttgtagtgaggagttatgagtatgtataaaactttcagacttgtgcctggcacagagtaagcactcaataattgtgagatctaatattaaatgtagtctcaaacatttgatggataaaccaaagatgtgaatattttaaatattaatatattctgccagattatttttcaaaaaggtgtttcagttcacacgtggaatatatcaaaattacgtgtttcctcatatcctgactctaactgcatgttattagtcctttaaactcttgccaatctgattgacaaatggtattctattgttttattgacattttcctattaataaggctaatctcatgtttagagcctatttgaatttccacaggatgcctatttatatgttttatccaattttctaatttttctattaagtaaaacaccacttaataggaattatttgtatattagagattaaccttttgtcatgtgcatagcaaatatttttcttattctagtattaacttgactataatgtgttttgcttttctttttttatattactgatatacttgaattagtttatttttttccctcaacttttattttaagttccggggtacatgtgcaggatgtgcaggtttgttacataggtaaacatgtgccatggtggtttgctgcacagatcgtcccatcacctattaagcccagcatccattaattattcttcctgatgctctcccttcccctggccccaacaggtaccagtgtgtgttgttttccctcgtgtgtccatgcgttctcatcgttcagctcccatttgtgagaacatgcagtgttttgttttctggtcctgtgttagtttgctgaggataacagcttccacatccattcatatccctgtaaaggacatgatccgattcccttttatggctgcataatattccatggtgtatatgtgccacattttcttaatccagtctatcattgatcaccatttgggttgattccatgtctatgctattgtgactagtgctgcagtgaacatatgaatgcatgtagctttataatagaatgattttttttattattatactttaagttctagggtacatgtgcacaacatgcaggtttgttacatatgtatacatgtgccatgttggtgtgctgcacccattaactcgtcatttacattaggtttatctcctaatgctatccctcccccatccccccatcccacaacaggccccggtgtgtgatgttccccttccagtgtccaagtgttctcattgttcaattcccacctatgagtgagaacatgcggtgtttggttttttgtcctcatgatagtttgctgagaatgatggtttccagcttcatccatgtccctacaaaggacatgaactcatccttttttatggctgcatagtattccatggtgtatatgtgccacattttcttaatccagtctgtcattattgggttggttccaagtctttgcaattgtgaatagtgctgcaataaacatacatgtgaatatgtctttatagcagcatgatgtataatcctttgggtatatacccagtaatgggatggctgggtcaaatggtatttctagttctagatccttgaggaatcgccacactgtcttccagaatggttgaactagtttacagtcccaccaacagtgtaaaagtgttcctatttctccacatcctctccagcacctgttgtttcctgacttattaatgatcaccattctaactggtgtgagatggtttctcattgtggttttgatttgcatttctctgatggccagtgatgatgagcattttttcatgtgtctgttggcgcataaatgtcttcttttttgcccactttttgatggggttgtttgactttttcttgtaaatttatttatgttctttgtacattctggatattagccctttttcaaatgggtagattgcaaaaattttctcccattctgtaggttattcactctgatggtagtttcttttgctgtgcagaagctctttagtttaattagatcccatttgtcaattttgggttttgttgccattgcttttggtgttttagacatgaagtccttgcctatgcctatgtcctgaatggtattgcctaggttttcttctagggtttttatggttttaggtctgacatttaagtctttaatccatcttgaattaatttttgtataaggtgtaagaaagggatccagtttcagctttctacatatggctagccagttttcccagcaccatttattaaatagggaatcctttccccatttcttgtttttgtcaggtttttcaaagatcagatggttatagatgtgtggtattatttctgagggctctgttctgttccattggtctatatctctgttttggtacgaggaccatgctgttttggttactgtagccttgtagtatagtttgaagtcaggtagcatgatgtatattcctttgtgtatttacccagtaatgggattgctgggtcaaatggtatttctgcctttagatctttgaggaatcgccacacttacttccacaatggttgaactaatttaccctcccaccaaccatgtagaagtgtttctttttctccacaacctcaccagcatctgggttttttttttctgtttggttttttgttttattttgctttgtttttgtaattacaacttctccttctcagatgctgattttaataaaaattgttagatactgcaatcttacatgtgtgggtattcattcacaaacattataggtgacagttgtgtgccagacatagtgctaggcacactagggtaaatatatttgcatgtacatatgatcataggtatgtataagctatcttgtcctatatccctcctaaactcttctgcctgtgctgatgtaattaagaagacttatgttagaactaattctagatttcttcctcttatgtaggaataacaaaacataaaacatcagaataagtcaaaaagtaccttggagatgcatacttcaccattcttttttgcaataaacaacacgaaagagttaaagtgactttgcagaagtgacattatcacaaagctggtaatgacagaaaagaaatgtgaatcccagtgcattatagtttccactgtatcataaggctttatggacacaatattttgtgaagtattgtttaccatgaactgtgttgacggtgttaattcaatttgtggagctatccacatatttaataatatatcaccatactaactgtgcttacttgcttcttttgttttttttaatcacttcttagggtcttatttttaagcagcaaggggagccacctacttgagccactctcccctgctgcaatggaaaacagtctcccttcaataaaatggctattctagcactttgttctcactgtctgatgtggcttggggccaggtattctgtaaagcagatttgagcattagactaagagagttatcctcagaaaggtgttctgagaaggtctgccaaaaaagttgaggcttaaaaaaaaatgtaagtaggagtaggaagaggagacttttagtgggcatttgactgggtcttgctttcctcctggtaatagattgcttggctatctacagatgcttacaagatgagaaaattggagtagaaaaaaattgttttaaaatggattttagcaacagaaccctctgctctgttgaaattgcatgtagagcccaatttatacaatggataaaaaatagatgtgccttattgttggcaaagatgtgggaaaagttggaactatcatgcactattgatgggaatgtaaaatagtacagccagccactatgaaaacagcatggtggttccacacatacacacacacacacacacaaatatacatatatatataaagttatacatatatatataattaccatataatccagcaatttcatttgagcgtatacccaaatgaattgaaaatagaatctcaaagagatagttttacacccatgttcatagcagcattatttacaatagctaaaagttggggtggcagcaactacagtgttcattgatggatgaatagattaaacaaattgtgatatatacatacaatgagatattattgtctttaagaaggaagaaaattctaactcacgccacagcatagataaaccttaaagactttatactaagtaacttcaaagagttacaaaatggcaaatactatatgattttacttatatgaagtacctaaagtagcaagttaatagaataaaaagtaaaatgatagttgccaggaggtaaggaaggctaaatggtgagtgattatttaatggatacagacttttcaaattttggaagatgaaaagagttctgaagatggatgctggtgatggctatacaacagtgtgaatgtacttaatgccactgaactgtacacttaaaaatggttaaggtagttatgtgttttttaccccaatttaaaataaaataaaaataaactaagtgcctctattgaagtaaggtctagccaaccagtagctctataccaaagtactgtattttaaaactgttgaacaagatgttttctaaaacctcttttatatttttcagttataatcatggtaaaatctgtatttgacattcctgtggactttttgctacagaaaagcacagtatttttttcttaggaaaattgcttgactctcagaaggaaaaatatatcagtgtgctccccaaggcattgtgcagaggttatatcagatgtcttggagtccattatgctgtagctgtaggatgttgtagggtagcaagaaataagtaactttgagaagtggctctcatgatatactaacatgctgggctttgtatttctttctttctaggttttctcctcaagtttgcattcatttatactaacttatagaaacatcccttccacatttgtcattatgactatagtaaaactatggaaaacaaagatgaaactgtaacattcctaaaacatatactgtatacataacctttagcttgttgtaatgtttaacacacgacactgtatcactttaaacaacatctcttcctcttatttgtcccatctaatcctctggcataatgtttttttcatgatttctgtcatttatccttcctctttttgattgctaaatacataatctaaaatgttaggttgcaaactagcttcaaattggctaggagcttgggagaactactctgaaaactttttatataaactctaaggaggtcaaattcagaaaaatctcagctgctggacttggatcccattaaccactgatcatttataattaatattaataaatggcagatgacacatgtatattgcttaactaaaaatgtgtgtgtagtattaaattttttaaaagttagttaagacccagaggacctgaatatatgtattggaataatgaaaagaacaaaactaccaacatgtgatctagtatcttctaactacaagcacctaaagttccagaggaaacagaagtacttttaattcatcatattacatattgtattgccatgaaactctatacctttacactgaaatgcctgtttcacaagcctatattaatctggacaattggcttattaatcattatagatatacagatataaatatatatatataatatatacacaaacacacacatacagacacctgttaatttcctagtctaaaaccaaattgtttaatacatatggtttttataatcagaaatttaaaaaaatatccaaatgctgagttgctttaaatcctaatgttccatagagccccactaaataatataacagctggaagggatttattcatctctggacactaaggagttagggcacagtagttcagttacctggttatataattctgggaacctatacaatgattaaaatggaaatgagacctccagttactgcaatgaaggtaaatggttttccaggggaattacacttggactcaaaatcaccttacaaaaagccaaaagacagaaacatgtattcgcttgggctatatgtccttattcaaccatatccattaccataaccatattaacatagattctttctgattggactgtgatttaataataatattatttgtttaaatgttggcaattttacataattatctcatttaaaattctttaaatattgcaggcatatatgcattattattatcgactgcattttaaagatgaggaaattgaggctttgagtgtgagtagtagatttcacactcaaagaccaggactcacactcagacctaattctgagtccagtgatatttcaagtatttgaggctgaaaagagtatataactaccttaagaatgtcagttaataagcaagttagtcagtactagaacctaaatcttttgtcaatctgatctttccattctgtctttttcaacacttttgccctgtgttcaagaggatcatttatttctaatcatctgctcttttctaactatacttatcacacatgaggcttagcatcaaccattatttcttattaatgatattatcattgttgaaaaaattgaaaacctctttttaccaccaaatctgcttcatctttctgtttacaaccattttgttattcaaataacaaacttaactataataagcaaattggccagtgatttccccttttgcttcaaatcattctgatgttttaaagccaaatagttttcacaaattgccaacattgtattcaaatgcactaaatggttatgttagtgctatcatgttgtctaaacaaaggcgctgtcagtcagtagagtcagtgaccttcaggctgttaagtggtttgtgcaattttcacaggattatgcttaaatataaatcctaataaagaatctcacttggctttttaaaaggttgttaaaattaatacttaatccaattcctataaaataatattgaagacataaagtaaaatttactaaaaaaaatgtatttcaaaggtttggattttctactcaatttatgaagcatatatggtctcctaaatgctgtgtgaatcattggacatgccagacatgaagcaaacttcccaccccaggaggcttctcagcctgaagcaagctgtaagtgggtagagttccaagagggaacacaacgtgcatgtgcgaggaaagcagatgcagcatgactttgggtttgttctttgggaacacacaactatatggaaaaatacatgctgctcccaattgctgtagacatctgctgaaggcacgtgagattgagactagggaatggtacagaatttctcctagaatattgtagtttaactttggaagcaaggggaattggctgttaaccgaataagagtttcattctaacatgaaaattgtacagcgtgctcattcgtgtgggcgcacagagggcgttaagctatttctttataaaaatatgggaacattgatttcctttagcagtattatttgatatctatttacagtttagttgggttgtcaaacatcagtgcatttctaataacatgtgtgtttgtgataccttgctcgtggcaaaggcttaaaaatttaaaaaggctttgaaatactttttaggcatgaaattgagctcacaaaataagcttaatggcaaattagtcaggaacacatggatatgtttcctttaatttgtatacagattttcagaattaagatgtggtaaaacctactagcagtctattaagccttctaaggcacttgcaacataattagagatttgcaaattcaaggttggcctaatagaaaaacgaacaaatttgtgtttgcattttagcattgcctgagtatttttacaaacacttcatttagcataattttgaaatggtggatatgttctgatcagaggactaagcagtatgaagaaagcaaaagaaacatgtttttaaaatcagggtaatagatacattaagaaactgcttctgtgctagcttttattttgttaccattgtcctatgggaagatgaggactataatttttcaagttgacctccctgccaccatattctctagagccactagaatggaactagtcttactctgttttcctcaaagatttaagtgtatgtgtgctacacaattatttaacacttcaataataaaataattgaaagtaattgtatggagtcatagaactgaacatagtcaccaacacatttttttaaagtattttatggtctatttgtgtttcttttcagtgatataagagattttcatttgaagtacccatgaaagttttcttagggcagttcaaagggaagtctgacagaaagagtgtttaggttgatgaagaagctttctacccttgggcagctttatcttaaactttaaactaaccatggaatcatatgagtgaggaactcttagacttctttcatttatatccctgactttaagcatagatgcatgaaaatttatttgattttaagacttcttagtgaatggattttcaaccttacttcaatgcaaaaacgtgattttccccagcttatcaaaagctttcaatgctcattctctttacattcaataattcatttgtctcctaatgtatacattttcccaaattaaaaatattcatttatattttttcctgtatttgcccttttgtctgtcttaagttggcccatttgttttattttggttatttgtctaacttagaaaatagaattcctttattgaatataaagtcccaaagcatgttacttagtttgtgtttcaatattcagcatcttgcggaatattgaaaaccagtaagtaagagctttgctagtttcaattacagaacatgtttgaaaaacatgcagttgtgttaccttcttcagtggtggcatatggttaatctaccaccaccaagtggaaattgggtaggtgactacttcagttatcaaataatactgcctggtaacatcaattttgttcgtatatgagcataaagtactggaaaactttatacttttggatcatttaaatgcatctaaaaatcatagtttgtttcaatattaatttgcttaagaaatcctttttctccctgtcaacattgcagaggccaattttagcacagttgtgacagttccttctaactcataaattacaaattgatggccttaaactgattttgttgttactcagcctcatttctgcatcttaagactggtctcatcctgaaaactagtaagaagagatctaatatcaaacctggatattcttaaagactggattatttaagactcgttcaccaaattttctaataccagtaaatggggacacattatattgaataagggtattgttagccaaattctaagattcatcttaaattgttttcttataagaattgtgtatttaccattttaaaaatcactattattttaaaacacttagaaagtgaacatttgaaaatgatgtgcctttggatgctctgtaatgttaagcagatccagacataaagacaaaagtaaattccagagtatttttgtagccatggaatcaccataaaaaggggtttttgaccccaatgttaccgtaacattgtcttcagcatttcatatttaattacagtagattactcaccaatataataaatatagatttatgagatactttaatgttctaaaacaaatgaaaaccacccaagaggagcctcaccaaacctgaggttgtccagattgcattgactaagattaagtaaaagatcattcatctccagaggtcatgcaattaatctcagagtgggagttaaagcaatgactaagcagaaaaggaagccaaatacaagctcgtaacaaaaggtgctggggctccaacatcaaggaacttgttatttcctttttatttatttatttttttttaatagacctaaaacactcattccttactactggtttctttgggtcctaaaattccacttggttaggtcagctattttccatgactatttttgatacggtcaaacaaatacaaagaataagcttttaaaaaactacagtgggttttcatgtctaggaaaacaacatgacacttcattttatgtgtcaacagaaagtaatttaggatgaatgtataataatccagggtttgaacaatgaaaaagctcaagatacactttaaggaagacatattctactccagggttttataattatttaaattcaaataaaatcaaagttcatcttcacttaacttaggtacctgatacctgttgcaaaatattgaggaaaatgtttggctgtcattccttgaagctgaatctttatacccttgcttgataatccctcaattccctgtggcagcaaatttttatttctagtaaacacaacttgttttttccttcaccttattgagattcaaaaccttgtgttttaaaccaagaataattttgaacttggtcgttccttattgcaaggacttcctccaactagggtgaattttcacccacgattagcctgcctttggagtttatgatgtgaagtgccacagctgatggcccatgaaagagactgctaagtctattgctcacatcaatattcccgctggatattttgctcattccttgggaatttcaaagaataacaaataaccaacaaatcatcaaaaactgtaacatgttacccaattcttgggaataagccagtgagactaaaatctgcttaagtatcacaaatgtgaattcccagcatttcaagcttgtaaactgtatccaacactcaccaatgtctattccatttcttagctgtacagaaggggcacattcatctggtaactgtcaacaatgaggttccttccttcttgaacccagctggccatacaagcaggcaggagttgcatgtttgaccctgagacagcaaagggtattgccctgttgggaagacaacaggattgcgatgtaatctggaatcaatttgagattagcaccagatgctccatgccagtaataagtgctgatcataagacttaattttgtatgctattagaattaatgataaggtataagcatagtatgtcccaaactataggaatgaataagagcagagtgaaaaactgaaatggtaaaacaagaatagaagttttaaaataggtaaattgaaaatatttgtttactttattttcatagcttgagtaaaagagttggaagacaaaggagaaaaggacttgcaagaagccaatttttttttttatgaatgtgtttgtttttcctcaaaagtcagtcgtaaatgctcttcagggaagggagtcagagagagccaaatagtggtcttaaagttttgtttgtgttattatagttctcttggttttttttttacaaaaagagaatggtgaaataacttttgtcacgttagtattagtctcataatcagtggaacacagtccttttttgagtcattcctgaaatagaaatgagcatgaaatgagcctggtattcattgaatattaataggtacatttagatgcatgtctaggactgtgcagtatatgagagatcctttactagtcatcttgaatttaaatattgaaatggtaactaattatatttcactgtatacacttttaaatagtagattatatattatagttggtaaggggaaacatattgtattatttggctggacaacagctaatagtatcacagacaactccttgagattctctaagttctacacataagcttcttaattaccaaactcataacagaatatgtgtcttgaagcagctttgagtcctattttttatataattataaaaatagaagtcaggttaaaaaatgattaatattggtgcaaaaatggttttaggtatcccttcaaagattctcctaaaatgatttgtaatctggcaaataaaaatattctccatgctataaatatgctcagtaataagtcagaaatagaatatcaatttctgtgaattttcaaagaaaaacatgctgggttaagggccaacatcatataacatttattgctttgtattacattatacacacacaaacacacacatgttttgtgaacttttataaatggaatcaataaaaatatgtgtatataaaatatattgttctagatatgaactatatttttatattatacttcaaaaatatgaaaatattgctgagaaaggaccatctgtgtcttctcacatctaacttttcttgattatttctaggaaagcagactaaacacacagttctgacataatacagcatcccattttgatttctggttagctcagaaggctttaccagccaaagaaagtctctgaaaagggcaaacctttctgacctcaggaggttctgataggaagaactgaagcggtgaacacccagaggagagaaaacatgggaataaattccccaaagttctgtaaccacagtgatgtgggtgcatagaggaagacataatttcattcttaaagaatgtccctgttttcacattctttcatttgtcttaaagttgatcttgcagatgatatagtccagatgaatttctgcttaataagaattcttgttcacaaattgacagaaaaatataccaaccatatatgtaaaaacacagtggagaatacccaagcataccataatacctttctcataattcagctaataatctatcagatcatttttaggaaaaggaaatttttgcttcttacaataattagattgagagtagagaattagattgagagtagaggtataaactcgtaataaaaattagaatgtggtttctttctgatgctccgcttcctttgatttattagtttgcatcttatcaataaattcaccttatccaaatttgctggaacaaagttttcaaaaaggaaattaaggctcttatgtgctaatattctgtgtagacaaattagatgctgctcataaccaaaacgatctcatttagtttactctagaacatttgaatagtgggatgagggtctttaaaactgttttggacatgtgaactgaaatataagaaaaccattacaaagttgggtttgtattagttttttgttgctgtcatcataaattaccaaaaacttagtgtcctaaatgacacaaatttattatcttacaattctgtaggtgagaaggttgacacaagttttaccatgctaaaatcaaggcatcagtaaggctgtgttcctttttggcaactctagggtagaatccacttacttgtcttttccagattttacaggctgctcacaatccttggttcatggcccctttctccagcctcaaagcctcaagtggcaggttgagtccttttcacacagcatctctctgacacactcttcagcctcttcttccactttccacttttaaggactcatgtaattaaatggaccaatctggataattccagataatctctgcatctcatggtcagctgattagctagatgctagaagtgaaaataacaaagatatgcaaatatgtatgagactcctttggaagttcataatttcatgggagaattggttgtaaacaaataaatgcaaaattgacagatgtgtcctctggaaatagaggagataaattattattggctcttaaaggccaagtagaattttccagctaaagagaaggagaggaactttccattgagaagcaacatcaataaaatcacaaaagcaagaaagagcatgatgtgatcaaattatagttaactatgtagtgtgactgagcaaaggcaaattagggaaggaggtgctgttcaataacataaccaagagtcagattcagaagggccttctaaaccatgccaagaactttgggagtacaggcactgggcagatttaaaaacaaacaaaaaaccaacaggaataaaagaccagccctctgcactataagaaggtaacctgacagcaaagtggaaaatatctggaagaaaacaaaaaaaaaaaaaaaaaaaaaaaaaaaaccaccagatctttgcaaaaatcattctagaggttctagagatgacagaggtttgaactgaatgaggataaagaaggaatgacacatttgagagatatgcaagaagtaaggcagatggccttgagtgggttaacaactttcatcaaacatcttaaaggaattaagtgctcctcagattttacccaaaccagattaaggctgttctattattaagggtgagttgattcactcagctgttttatagtttcatagagaccatttattatcgttactaattatttttattttagggattataattttagaattcttttcattttcaactacttatatatcatttgtttctcatacctaccccaaataatgagaatagtaggaattattgattctattttataaatgaggcaaacaaagcacagaaagtgctttacttaaggtcatattgctgatgagtaatatagccaagtttaaaatgcacgtttcctgatacctatttcagatatttaaaatttaatgtcccactttttttaagcacacattttaaaagatgaggtcttgagagtttaagtaatatcccccaaagatagactatgactaaatagcttgacagaaaatcaaactcagatctttctaacttcaaagcccaaggtcatagcagctatacattactgcatccctcctcacctgctggagaagatcagggaagaattaatagagaagtagcctttaaaatgtatcttgaatgatgtatgtaggtaaggggtgatcttcaagatacttaaaaactatacagtaaaatatacaaatacagtaccccatatataaatatgttaaatatattatcatacatagataatacagctgcttaccaggtgttgttagcagtagtgcaaatcatttgtgaggttattcagtgatgcctgaaaagagttgctaatttttagaaatcacccggtattgttttcagtttgttagggttgattcacacacccacacccagacccattcatactcagggaaggcttcctcagagacattttgtgcttaactccttaaatcctctgcagtttaaaagttccagcagaccttgcaggatccaaaagtgtgcttgattaagggtgggcaagatgtaatggacaaaaaagggattcaccttcctctccccaaattctgacataagagataaacaagtaagccaaccttacttctgctttccttcagtattttcactccccaatatttgaagtcacttcttgactactactctttctcctaaatattctctggagataagggaatggcttatatacagtcattgatcacgtatccccgtttctacctgtctcagtacatttttgtattgctataacagaatacctaaggctgggtaattcattcaaaaaagagtttatttggctaacagttctgcaggctgtacaagaagcatggcaccagtatctgactctggtgagggcctcaggctgcttccactcatgacagaaggaaaggggaactggcacgtgcagatcatatgactagagaagaaaagagagagtgtgtgagagaatggagagagagagaaggtgccaggctctttttaacaagcagctctctgggaaactctcctaggaactaatatagagtgagaactcactcattaccatgagaatggcaccaagtcattcatgagggacccactccaatgactcccaaacacctcccatttggccccaccccaaacatttgcgctcaaatttcaacatgacatttgcagggtcaaatatctaaactatagcattaccttaactaggtcttaaggtatatatgaagtttactttgctcagaaaataaaaaccaaacatatgggctatttcaagctctttacccctttaaaacttttttctatctatttcatctggccttcttttttccagggtcactttatttcgttcttaaatacttcaattaaatgagaaatatttattttagagattaagacagtgttcttagagattgagtaagacagtgttcattctttcaggaattgtcacatttcctttaattttcagctcatttgcttaagcctttcctgagactttctcttcccattaattgcattgcacataacatctgctgtccttgctacaccctcttaaatggaaagtttcatcatactacccagtggtccattttggtggcattccactgaaagaaaaattcaatggattacaacaaaagccacagttattcgaaactcaaggggaagtcaggcttctgagactgtgtagtgccacttcaaaagaggatacaaaagccccaagatcaggcaagatgggctagaatcatatttcatgactttaaaggaagactacattctcaactccaccaaataaagcatcatttatgcttgctatagaagataattaaggaagacaaggttattttgtcatctttcaacttttgacaaccatcccaagtgctttcctctcttcctctatttctcttgttatttgttcctcttcctgaccacctctttttctccaaacaatcgcaaaaactttttggtagaccactgttttccagctttgggctgagagatggactctgatccacactcccaacctcagggaaactctgaagtcttcaaatcactaaaactgtcctagaactcaaatgccttctggaaacaagagaatggaattctttctaacttctctgttccaacctggacttcctaatgccatttcttgaaacagctttagggatactctagttattcatcattgacttggtcccaaaggaccaagcatgacaagtcaaaatgatattcctgaaaacatgatatagctctctggagttcactgtaatctcttgaagctgatattggaacagaagtagctaactggctgagtactctataataagtgggacttattaagacaggttgtttgggacactgggtaatcacagcatgcccgcatatgagagagtaacaccaaagcatctctgtctatgcctgtccttctccaactctaactcgaattaagtcacagccatgaaatcaagaaaagggaacaatatttatctttttcatttaattcattcaacgaatatttatagactcactacagttctcaggctcttgccaaagagaaaggagctaccacagcctttagagcaatagtagcagtgcttactaatataccaggaatatcggccttacatgtctccccttgtgcacaaaattatgcaagtaaatcagggaatcactgctagaatctcccaatactatccaccccacctgtattagtgcattctcacactattaataaagacataaccgagactgggtaatttataaaggaaacaggtttaattgactcacagttcagcatggcctcaagaaacttacaatcatgatggaaagggaagcaaatgcatccttcatatggcggaaggaagagaagtgccaagaaaaagggggaaaagccccttataaaaccatcaaatctcatgagaactcactcactattacgagaacagcatgagggtaaccacccctggaattcaattacctcccactgggtccatcccaccacacatggggattataggaactataattcaaggtaagatttgggtagggaagcaggcaaaccatataaccaccctactccaaaataatcagtcctgtgaattgcatttccttttcaatactttgataggtaaataaaaattaaggttgaatttctataaagagtaagttctttatatttgtagttgttactacattaattgttcttcctaatattatgaaaactggaaacaaaattcaatatcaccttgacaaattgcaaaaaggcctagaaatatgaattaaaattagtagatgatatactgggttgcacatagggacccaatcaaacaatagaaggaaacacactagttagtagcaaaggaagaggagtgaaatctactaatgataacgttaatgttgggagggaaagtctatgcataggaggttgactatccaaagaatgaaagtaattatttgatttcttctgcattaatcagatgcttattagaaagccatattctattttcctcaggacattctgaaagtttgtgaagagaaaaagtagatagggtacaagtcttaatatgctacatggaaaatatggttgataagaaaaagttaaaagtcatataagttacagaaatcactaaatttaaagattcaaatttctaaagagctcttgtgaaaggatgacactctcttcagaatcattaaaaattacactggaaaaccggctgtcttggaattgatacttaaaattcaccccaaaaatagaacttttccatcagtggtggaaagggacctataaataaatatgtgcatatacatttatatataaaaaatatatacacacacaaacatacatacacatttgttccccaggtctatacttccaaacctaccctcatcaataatgatagagaaagcacagtgaaaagctgtaaaataggtacagtaaaatcttactaatcttgctaaattacagggtggatatttctagattagttaacacttaacctccaaacaaattttaaagatgattaaatcagttgtattcccctccaagtcctatatgtaaccattattgatgaagtaattacaaggacctatcttgatgattgtggaaatggatgttgaaagtatttctgattaagaacagacaattgcttcaacaaatagaatgggagaaaaagtacctagaacaatctgcattacctgctataggtgaaatactccccttatcatatattatgggtaaagtttatcacaaattttaatgtagtagaggttgagtggggttttctatgtttttcaaactagttaagaaaccagtagtttgaagcaaaatctgcaacaaaagaagaatgagtaagatcctgaagcatagtgaaaccatttaagaacgtatttgaagatgcatgaaaatcatctttacatatgtagctaataaagagctgaaaacattaaaccatcactataaacatttatattatctgtagctaaaattgcatggagtgagacacatgatacgtggagcagcacaaataagaaactgggtagtcatttttccccacatgatgcaattccagattaaaggtacatttttcccccatagaccaataaaaagcttcagagaaagacatagtgggctgtgttagaatgagaattagacagcacagtcaactagtgcataacatgatgaaagagtagaatactatcaagatttcttgtataatcaatcacagcaaacatgtcagcaagtatgaggccatccgctcctgtccatacaacccagtagacaatttgggtaagggaatgagtatagcagtgccaaatgtggctatcaacacttcttctgtttctgtctcaaaagaacaaaattctaagacaagctcttagaacaaatggaaatttatccaaataaaaatcaaatgataaatgcccagagaatattctttctttggaattcgttcaattctttaatttaaccagctggaataaattttcaagtagcattctgctcagccttttgaaatgaaggacttttctgttaattggaaagttatattccatcaaagatgaagacagtgatcttgccttagtgattcttagaaaaaataaaaggcatttggtgaatatttatcatatactgattccagaacatgtattttaagcacaaatgaatgagctgtgggcctacacatttaactaaagaaaaatagggaaaattcaaatacaagttttattttaaactctacataaaagctaactttcactatgctcagtcatgagaggaatatgtaaagagaaaatagaaatagaaaccattaattttgagaatgaaagatggataatacagctgtggttcctgattttctgaagcaaatgaattagataagtcaacacatttaagtgttctttactgtgttactggaatatgtgttattggggctggggaaacatgagagtcaactcaaaaagatctacagcaagaaaataaaaatttactgggaaaaaattattttgaaaattcatatttttaaagcaatctgtaccataggcagtactttaaacttagtcattgattatagatatattaaataacattgttacatttaaattttaaattggcacgttaggcaaactaatttatcgcaaataatgtgaaaagttgtttaaaaattaatgatagtcaagtactaaagaaataatttttccagatgtcttaaaggaatcactggatagatggtctgaattataattgtgtattctgatttaaaataattttataggaagacttctaggtaatactatttatgtactttcagtctggcaatgtgtgtataacagaaatttttcaaagaggctgttccacttttttaaatatttaaattgctgagagaactttttaaagggtaatatgaaataaatatttaataagttccatagactcacgcatattctccagcttgagatggaagatggtggttgaagcagcagggggcgccagcgggcatggtggtgagatggggacagggtagagtacgagtgttacaaaaaaaagatgaacacatcaattcgtttttgagatagtcactaatattttgagaggactaggtccaaattgaaaatttgggatagaacacgacaatgttgttaggcaggctttaatggtctttgaaatattagtgttaggacgccccactgactaaatttctgaagataggtaataaaattcccatattataagctcataaacattatataaaacaaccaaagtatcctattcagggtcatttttttaagggaacaataatattcatccaacaagctagtcatgaatttcacggcaaaagtaatgaataatatttgacggtgcttaatagatgaaatttgccaacataccctttgataacaagtaagaatgagaataaatttatatgcttatttaatagatacaattatttaaaacccaagatctaattcaaaatgtgttatgcaaacatgcttagatcaagaaattgtctacatgtaagtcaatgtatctgatttactttccaagagttttatgatctatcctaaggtgatagataggatttcaaagtcaagataacaacttctgctctgaagaaaaaattacttattgtaaatgaacttttaaccaaaaagcagttgatacaagagaaataaacccatacaaaagaatgcaaaatctaaaatatttaatataaattataataccctgctagcttttaaaatattatacaataaaatacagaatatcctttacttttataatgagtaaaattcgtaaacattgccaatatttttaaaaatctttgggtactttctcccctgatcacttttaactgttcttttaacatagaacaggaaggcatcctagtatgcaatacccagtgcctttaatagtttcttttggactccagctaatggcccttttaaatggaagcaaggattccaggctggggttccaggcagcagaagcaatgaggtggaatggagttagcttgaatgaaagggttatggaaacctctgtcacgacattgagccaacattcaaaatttcagattctgagtctttagtggataataaaattatttaaacaacagagaaaaaaatttgtaaaggcctattggcaatggtccatttgtaaggaaggtatttaattaggcaaaagagagtttattatgcttaaagcagactatgaaaatacacattctaaaaagttgtgattactgatatttatgatgtctgctataaggtgaaatgatttataataggactgcattcaaacctcaagtagcattttaaaattttaaagctatataatttttctttctcttttttagtattaagtataacaaaatatgaaaatatgtgataatttcattaaagcttcaaaaatgtaacagtagtagtctaatggaaaattatttctaaattagatataaatgatgtataattttcaagttacatatatatatatatatatcatacctctatatgttgggggagtggaaatactaaaatataggcttgtagcaaaaataaaaagaaagagaatagagaatgagatagtgctgaatggtgctgactcaaaaagtttattccaaatgctattaagttctgagttaatttctgataagcagcttttccttgcccagcaaattcaaatttcaagagattaagaaagtacactccaaatcttgatttttataaaactcctctcttttaaacagttagtccacagctgggctctttccttgcctcagtagctgaagtgacataaacaaggatggcatgtcacattgtgctctattgagaaataatgtggaggcagaagggtgctgtggttaggaaccctccttatcctcatctgtagaacaggggttgaatagagcttctaggcaccgtactcttacttagaagttggcctggtacatattaaaagtaatggcacaaaccacaattattttgcaccaacctaataaaagtgtgtgttgaattgtagttataattattcttactatttttaaaaacaaactatccaggtcatcttcaccttgatctgcagcagggtcctaattgggagctgagaacacagagaggagaaatgtaaatagtccagcctaggaagaggttaggagagtgaggaaggtttccctgaaggccagataattcaacagtaagtctgagttagggcaagggatctagaaactgcattctagataaatgtatccaatatatgggatcagtaaacattatggtgggacaagtgcaggggtgactaaaaagacaagtgtgaggccagcaaagtagataagtaagcaggggtcatatcacagtggacaaggaccctgagggccatgttaagaagcttgggtttatctgctttcatttcctaaagtttatactcagtgccttccaatcattatgttcttgtttctaaattcccaaaacagcatgatacaaatagagtgcctctcttaaactggtcctttgaaattgatgataaaatgttatttcaatctcagtatattttaatggtcagagctatctttgtaaaagtgggctcaaagtaatatcccaaattaatagcatttagtagagtatgtaatgatgtatcaaattatttttctttgaataattaatcagaagcatcttgaaaattaaatagaaaaggcaatagaattcgtgtgtaacctaccgcataggtaaatcaggtagctttaaatttcagtgtggagaaattgtgtgcttatttatcaaaaagcaaaagacattcattctttgatatttttactatatttgttgtaaattcctaggttaaatttagagcaagaagaagttttctattttattaaaacaaacaaaagacatttctcaatttacttgataataatataggcctgtaaatatgtatctacacaatacattataattgcccccacaaaagaaaaaagtcatactatagcaattcctcttccttgcaaattttcccagtgatattttaatttaaaataacaggccgggcacagtggctcacacctgtaatcccagcactttgggaggccaaggcaagcaaatcacctgatatcaggagttcaagaccagcctgaccgacatggtaaaaccaaaccccatctctactaaaaatacaaaattagccaggcacggtggcacgcacctgtacttccagctactcgggaggctgaggcaggagaatcacttgaacctgggaggcagaggttgcagtgagccaagactgcgccattgcagtacagcatgggcaaaaagagcaaaactccgtctcaaaaacaaaaaacaaaaaagaaaaaagaacaaaagctggaattttcattctctatacataataatcaggtccaattccagattcaaaaataataagatcaacccctttttcacactgtgagtgctttatagaaggcataaagccatgggcttccagttgaatttcattccacaccaaataaaaagaaaagaaaaatgtaatacttatttaattggtttgagtcatataattcgtgatatttagtcctcagtctgtaatgtggaatacatttttagcatttgggtaaaaattataacctagtttgtcttgggaagtgaactacttacagctcaatggctccccttagtgacacttcgcaagaaattcacaaagcagcagcttttatgaagacctatagacagattttatccaaacatcaagaaaatagctgctattcataatttaagtggttctcaataagtgaattacagttgtgattctagggaaagcaactctttttttcataacctcattatgtttaaaggatattgaacgtgttctatggtttgcattttcacttggaatttaaatatatacaagttaggaagaataattcaggatcactctctttgtcattttttacatgtttattttttctagttcatatatgcacttgaacaggttttaaaaagataacctgcaattaatttaatttatatctgggtgcctattccaaatttatctattaagaaaacttgccttaaaattagtagctacagtaagtcaaaaacgtatttgatattcattaggaaaaatgaaagaaacaaaggagcaaccatgcaatttgaagtaagttttgagagtatatatttgaagaaattgggtcttctgttgctctgcagctttggcttttaaatgtggttgcacatcaaaataaactgggggggaggggtgtgaacttgttgttgactacaggttcttgggcccctcataagaaccactgaatcataatctccaagggtgggatctaggaatctgtatttttatatgttttggaacattgtctgcagaaggccataggaaatgtttatgtaaaagactgtatgtgtttatactaacagaaaataatttcagaatcttaaaaataacaattatcaattcaattatgtgatactactatgcaacaaaatcttaaatatggctttttggtctacatggagattttagctactctttcaaaaattaaggctcaaaaataccaaccactgactacattccctctacagcatcttattacttacagcaattttctgaaataggaaataaggtcaacatgtaagaatagcctattggccttttctaaactcatcacagaaacatccaaactctggcctgctatctgaattcaatacttgcccttctctagttttcagtacactggtcctcaggacaaactcccaacatggcaattgaagcccgtatatctttccagcttctatgggtaatattctatatatagactctgatcaaaccaaggaagttgactttcaatgccccagattcaccatgtccttgcatgccttagtgcatgttcactgcctggcatgcacttcttccctcatcagcctagcaaactctcagtcattcttttaggctcacctcaaacatcattacatcaggggaattattttcagtctctgaaatcattttcagtctctcttcatggagttcaatgctttcccactgtacccccaacaggaccttgtacacacctctattttagcattaacatgtgactataattattggcagtctccatatctaacttatatccccaggttttatcacacatttttggcacagagtaggggctttgttcatgtttgtgcaaggggttaataatattagttttcatttgtcccatgagtaacatatgccagtcaccatgctaaatgctctaccagcatctcatttaatccttatgaagtttagcaagaagtaaggattattcacattttaaatatatcagagagttaatcctgagaaatatcaacaacttgccagagttcacacaactagttggtggcagacctagaatttgaaaacagcatttttctggccctaaggacagtgtacttaaatgttacaccatagtgcttctctgcaagggctcagattgtacttgactgctaatagcaaattctctttgatgttttctacccaaacaccctcataggtagaacatcaaggggagatgaacgctgttttaatcactagaatgttccaaaacccagttcaggcaggtacgtgcgtgtacacatgcacacaaacatgaatattcagtgaatggcaaagcacacgtgtgtgtgtatatatatatgtgtgtgtatatatgtcagattgtcataactggaatgcttagtttgcaaaattgccaaaaaagcctgaaaaaaatattaaccacatcaatgaaaagtcaccagaataaaaaaggaagtcccctttaatgaaaaccttacaaaattatcccaaattacacgtgatttttaatggactacagccactcttgtgtatttctattttatttcttacacaagcagaaaatatatttatgcaaagggtagttagcatttccaaccactaacacatggcctgtaaaaaaataacaacctcattcttctgttgtgcaatagccctctgttgagcagcaataatgtacaatgtgttagtttcctgttactttactagagccttccctttcactcactgcccagactagttattccttggacataaagttataataccgagtttcaatctacttccaaaaatgtttaggcctgtcttaagaaataatcatatcagtttgctaataagcagaaatgcactgccagttgaggatgttgtcacaagtggctaaaaaacatataaatcaatctgtgaccaaggaagaaacaatacatttcttatgtgtccaaaacattatggttggggatcacagctgtaagatgttggaccgtcatcaagagaacaatgtcaaacactgaacttctggatgatttccataaaaataacattttgcttggggtcagtagtttttatggaactttggaatggtttttgctgacaattttttcgagttgaactcaaacacctccaaaatgctcctcaatatggaaatattatgtaatccaacctttgcagccatctccttgtgaaaactaagcacatagcatgaaaactagtatttttctctgtttgtacagttttataaaatttaaattatgctacatattcagaaagggaaacttactcttcagttttccctgtttggttattatattcaagtcagcacatcaaatgtgtactcattaaatccagcatggaaagaaggccctgatcccttctgtagaaatcttatcaacccagcaaaattcttttaagtgaaaagaataatggaatcgagtaatcagaatataagtagttcagtttaggcataatagttgcctctaatgttgtttgttcctctctgtatgtccaaaacaatttgcttcacccttgaatgaattctgatttttgtcaattgtccctttagattccagaatttgaaggtatgttgtgctgagcccaacaaggaaagctttcaaaaagtaactggaaggttttataaatacagtctcatgacaaagctagatgtggcataaaatcattaatccaaggagaccgtattggcgtagtatacctatgcaatattaataataccactccctaggattctgtaaccagagcccaagaaaaggaaagccaaaccactgaattcaatatttgcagcctacttcaggacatgaaaatattttggttctctcatgcagacaatttctccaaaatatttttgtcaaaagttacttattttagacagtctaatttcaaattttaaatgacccagtatgtgggatacacattcagaattttgtcatacctcaggaaacagttggttcctagtttttgtttactgtaatattgatttgaatctaggtaatttctcattgggatatatgtgttcatggatgttactaaaaccatgccttcagactacactgtagactacatatataaaaggtgtacatgataataaaacatctagttaattcactgtttagaaataaataaaaataatcatccaatttggtgccaggtttatctacttcgatcaaattattctcttcttctaaaactcccagcatttctccaatgccgacagaataaaattcagttcttcaagtggctccctgttggctacaataataccttttcacatccaaacctttaaagtcatgttgattccacttttaaaaatgtctcctctcataatgtgagtctgagttaaatctatgcttcaaacccagctccaggtcgggggcctgcatgaaatccagtatacatgtgataaatatctactcatttgctggatagagactcaacctgccctggtagcttgtaccagagggttattgatcagttatagtcatcaccaccctgcatgtagagaaattataatcaaaattaatttcaacatacaaatatttatgttaaaatacaattatcttgttattcatccttattatttctgcatttgttatgcaaatcagttcttttctcttagatagcaggcaaatatcttgacaaattataactatgtaactgctacttcgaaaaaaattgaatacaacatggtaccttaaaaatatgagccagataaaaatctctcctttttttttggagatagaatctccctctcttgctcaggctggagagtacagtggcgctatcagggctcactgcagccttgacttcccaggctcaagtgatcctcctacctcagccttctgcatagctgggacacaggcatgcatcaccatgcctcattgattttttttattttttatagcgataaggtctcactatgttgcccaagctgatcttgaactcttgggctcaagcagtcctcccacctcagtctcccacagagctgggattacaggcgtaagccaccaggcccagccaaaatatacattttaataaatgttttcaacagcaagaaatctatctaaaactttccatgaaacatgcataaataactatcatgtaaaataagttccaaacttagaagaacagaactatttggatttcaaacagtcatatgttagttgccttattatatcatatacgtgtttcacatttacattgtttggaatataccacagacttaataatagttgaatgattgaaatagtagatatttagtatctatcattatgatatataatctaagagaaatttaagtcattttttaaaatgtaattaaaaaatagaacataattgaatgtaatttttaaaagagtatcctttcatttcaggaaaaaaaggaagggagaggaaaagaaaaaaacctaataaaggagaaagtaaagaagcaatacctgacagcaaaagtctggaatccagcaaagaaatcccagagcaacgagaaaacaaacagcagcagaagaagcgaaaagtccaagataaacagaaatcggtatcagtcagcactgtacactagagggttccatgagattattgtagactcatgatgctgctatctcaaccagatgcccaggacaggtgctctagccattaggaccacaaatggacatgtcagttattgctctgtctaaacaacattcccagtagttgctatattcttcatacaagcatagttaacaacaaagagccaaaagatcaaagaagggatactttcagatggttgtcttgtgtgcttctctgcatttttaaaagacaagacattcttgtacatattatcaataggctataagatgtaacaacgaaatgatgacatctggagaagaaacatcttttccttataaaaatgtgttttcaagctgttgttttaagaagcaaaagatagttctgcaaattcaaagatacagtatcccttcaaaacaaataggagttcagggaagagaaacatccttcaaaggacagtgttgttttgaccgggagatctagagagtgctcagaattagggcctggcatttggaatcacaggatttatcatcacagaaacaactgttttaagattagttccatcactctcatcctgtatttttataagaaacacaagagtgcataccagaattgaatataccatatgggattggagaaagacaaatgtggaagaaatcatagagctggagactacttttgtgctttacaaaactgtgaaggattgtggtcacctggaacaggtctccaatctatgttagcactatgtggctcagcctctgttaccccttggattatatatcaacctgtaaacatgtgcctgtaacttacttccaaaaacaaaatcatacttattagaagaaaattctgattttatagaaaaaaaatagagcaaggagaatataacatgtttgcaaagtcatgtgttttctttctcaatgagggaaaaacaattttattacctgcttaatggtccacctggaactaaaagggatactattttctaacaaggtatatctagtaggggagaaagccaccacaataaatatatttgttaatagtttttcaagttttgttcactctgttttattgtttgttttattgagaaattcttactcttagagactcatgaattaagaaagagaattctgctaactcagagaacctggttcctatgtaattcagaatatattacatttctcagtaatatttgttttttgaatccacctttatctgagccaatggagatttacttatagcgtattaggagatatttattccattttcttattttaatcaacattctaattatagacacatgggcctccctagctgatttcactgctcccccttcattgcttagaaatgggcatcatttcttgtatgtcagatccccctgcatcttcaacatttagtcttttcttctccatattttctatctgtggatctctttaggggattgaagtcaccctagctgaaggcctcaccagtgtttcacagaggacacagcccaccccttgcaggaggaggtatctctgagtgtgcagcacagaatcgcatgacccaccttaaccttcctgttgtcatggaaggatgcacggctgctctgtccactgtgattcctagccctctcaagatcactgctttctgaagaatttgcaatgactctggcttctggctgcttatctctggacacccgttctccaccagttgtacagttcatgtaatctacttggcttaattgattttccacttctctcttcctcttctaagatataaacattttaaatgatttattcctgtttcttattctggtgtttctttccttgtccctatgagataagtgtctcaactcactaaatctattcccaatgtataaaataattctaattccattttcagctaaaacatatattaccaagaagaaacaaactttatcctacagaatgatgttaggtagaaatatgtccccaggtttgagacctttcggatgatttcatataccatctttcttctgagtgttacccagtcaagtataagtagccaaattatttttgcacatctttctgtttctcatgtcttcatttattcaacaagcacttactgggaaggtctacaactgcataggcaatgctggaaaaagggttaagtaaaccaggacatgacaatggtggcaaatgactatcaggtcttcccatgtgtttgactcaaacttattaccctatggtccttctgacaatggcagaaggtctgaatccttgatgctaaacttatataaaagtagaattattacaaaggaaaaagaaataaaaactaacattcattttcatatgttggatgaaatataaatgaagaaaaagataacatcaattttaactgtaattctccatccaccagtaacagatccttaagacaatagaatcatacagtattcaaaccagcagccttctcaaatttgagcaaaaactctatcaacctctggtaaagttcctacactagtcacagaaggtgttaactttctactctgattctgtctccataatggggtaaactgttgatagtttaccccatcaacagatggtcggtaaattattgattcgaagaatcgagagagtgcagcaacataaatctgttaatgtctgatcaagctcctgccctgttctccgaattcagcttcataattaagggaaggcctgttttctatcctcagatttaggttctagtagcagttgtgtaaccactagtgagtcacttaactcctctgggtccccatttctcatgtgcaacaagaaagaggggaactggagatgatcactctagttccagacaagggaacatttcacactttgtttacttcagggtgatgtccctgagtcctcattagtgactgcgtcctttggaagttatcccaaccctgcttttctcaaaagtgaaaatgtataggctctcagaggagacagatttaactctgcttctctaatgttattgaattaaaagctgttcacattagtggttattaaatattgaaataacactgggaagaaaaagcatatataaatacagctaaaaacaagaatagatattcattctcacaaagggagacagcaaagaaaatggaaagtgcactggtgctagcgttagacagcttgtgttaatgtctcaattctgctactaactggttgcagcttgtgtgaccttgggcacattgtatgatctcgcagaatatcatcccaaatctgcaaaatggaattggcatcatctcttttgcaagattgttatgagaattaaaaggttcttcattcaatataataataaatattttgtatataaatgaatatcaattaaaagttatgactaattccacaagtcaaacatataaattttatttcttgattcatgatatgtgatagtattcataaaaatgtacatgcatgataatttcaaggaataagtatatatgtgagaatcatggaaatgaaattaataatattaactagtaattaaattgtaattttgtcttgagtcttcttaaaattaggaaactacttaaagtacattttttataaatgggcataaatacagacagtatatattttccatggatatattttcatagcagaggaaccaactagattctttctcaatacaactgcaactatttctggtcaaattatggggaaaaggcctgttttgtggttgatctgttacaaacagggtgtaacttcttgtaacgcaaagataatttgtctggaattcatccaccactgaaaaaataaaattaaacaaggatcatgatcaaatcaattgaaatttttccaaatttaagcaataacatttcatcttactaacatagtagattattgtaactttatttcaaatgttcttagaaaaagaaaagcaaaacaaaacaaatggctgtacctcctttatgctagccacttaaccctttgactatactatattatgtaattatcccaaaagccctgtgagtcattgatgtccttgttttacgaaagaggaaactgaggcacagagaagtgtctaaagtcatacaactagcaacatgtgagtttggaagtgacacccagctctggctgactccaaagcccactttccttctccttcatcataacttctaaagtcatatttattattagttccaagattgcccatgacatataatagtgaggtatttcttcatgatctaaaactattatcccccattaagaagcctgagacgtcaagttctagaggcctcaacccaggataagacttaactctgaatctgaactcgaaatgtgactgtgtgtgtgtgtgtggcgcggcggggtagggtgaggcggtgagacacagagctgcaggaagcctatgggctggctggatgtggggtttgtggggaacagtggattgggggaggcaagtgcattggtaggcaagaggaataaaaaggagaaatgggaaatacgtgctatcagtaaaggaccaaagttcagaaagagaacagtaagtctggctccttgggaagccctcgattgttatagcnnnnnnnnnnnnnnnnnnnncagggtatttgccagcatgatcatctttccccctgagtccttgttcagaattgcaatgatccaggaagaaacatcaacagattttcttcactgttggaactaccaaaacaactttcttcagaggatacttcattttcttccagctactttcagacattcaatatcaggattttaattgtcacacaccttttcttgcccatactggctctcaagtaattttgaggctaacatatccatcacatacacaggtacaaaaaatgaaggaagaaagaaagaaagggaggaagaaacataggagagacggagggaggggggaagcaagaaagcaaaatagcaatcatttttattcatagtccttaaaatacagtggtaacacaactccaacaagtggaaatatttcattaattggaaaattggctacataataatttcaaaagacataattacatgaccacaaaataatctgacatataaacagtttgcaaactgttacagttacttctatatctatagctgtgtgcagtgaaaattgttgttcaatatgatgtggaggcaatccaacatactgaatcacctacaaaggattaagttttattttaaaaaagaaaactggcagatacatataagaaaagtttttaaacaaggttaaataataactttaccaaagtgttctgcctaacaggtttaatggaagtattcacttttgtactattagcatcagttactattttagctgctccgaatttctatcacaaatgaatttcaagcaagatctagattttcttcaacaaatttaacaacttcttaaacattttaaagaggagtctacctttataaataaaacaatcaaatgtattttaagtgcttggaaattataaagcacaataaatatataagctattactgttgctagccagtccctagctacagcaacagtttgacattcctttccccattgctcacactgccgcccacactggagatttcagtctaagaattacctatattcttccccaaaaggagtcaatagaagtacgtgatgagaccacatatttgagaatgcaacaatgtagcccttccttactagaagggagtaaggatatacttcacttccttctagtatatctgcattgttttttttctgtagctgctggcaatggagctatatcaaacatggaactagaggtgcaactttactttgtacattgtgtgatacccaaatacaataaaataaactaccactaaatgtggaatcttgaactggagacatttctgagtcagttaacgctaccacatacggtctccccagaacacgcacattccaggttggtcccaatctcccaagaggtagaaaatttggtgacaactccgtcaactatctggctatgatgatctcaagatttgaaaaaaagtaaaaagaattctgatcccaaaaagaaaggaacccttattttcatccttataactactcagtgacatgtactgcccctccaccagaatgacatgccaaaaacgagtgccatgccctggggcactgtgctgtccctggcagcagtccgtccatccttttgacttccttccctacttctgttctacactttgcttatttatggtttttgattgactagtttgggaaggaaaaaaaaccctacctaatgatttaaaaattaacctaggaataaactggagaagacataatttaataaattcctcgaagtatagagctatggaaagaatattatttatacttctttttttttttttttgagaaggagtctcggtccgtcgcccaggctggagtgcagtggagcaatcacggctcactgcaagctccgcctcccggggtcatcccattctcctgcctcagcctcccgagtagctgggactacaggcgcctgccaccacgcccggctaattttttgtatttttagtagagacagggtttcaccatgttagtcagcatggtctcgacctcctaacctcgtgatccgcccgcctcggcctcccaaagtgctgggattacaggcgtgagccactgcgcccggccccatttatacttcttaaaagaagtttaataaaaataaactagaaaacaaaaatagaaacactttgtgtttcacatacaagggattttcctcatgtggcaactatttggaagaaggtcctatttatcactaagttcacccttactgatctttttcccatagtaaaaaaaaaatgattatgactcactttatgaacacaccaaatgctacaggaaaatagattttagttttatccaaaccagcagtgagaataatttatgattccaaaaaagacatagacatgcagagtcaatttaggaaagtgagtcagtttcatgcaaataagttctagctttcttgattgccagtctccttttaatgttggaattttagggggggaaatgaattattgtggtaaaccaacaattccacttgttaactatggaatatttaaaggatagcttaatatgtacatgtgaaagggtcaagagaatagagttttatttgaatatccagatgatccaattaaatccaaaatggtattatttctagaacagaagagaccattagaatgtgctgttctagtatctctagaattctcaaatttattatgagaattatcctttccacaattgtcaaaatagattgtttggccataaacatccttgcaagcctaagcaatttgaaattcagggcctatatcagtttccttgcctccacccctttcacccccaaaagaaaccagtcaattagataatggataaattaacactatattgacaagcaaagaataattagaaattaataagcataaagagaaatgactgtgtaaaaaaatcacttgtttcaggtttaatgtagtcactttgggacaggaatataaaacatgaaacatgaaaatagtcagcagatgccctttccatccattaataaagtatcttttaaataaataatcaatcaacctatagattctgccattaggaaattagcaacagtgctttgctgtaccagtagagctatcagattagacaatcttcatatgtataggtgacataacattctcctaaaattttctatcaggtttctagatggaggttaaaagccttgtatgattttgtaataattgatataccaagcctggcatccacaataaatattgatgttttccattctgtaaaaatgatataaaacatattagtgcttttatagttatgcaactttgtatgttttgataccaaaaaagatccagaaaatgtgaaaatacagatagttatctaagtatagcttcaccgagattgggtgatttaattatcaatttgaaggaaaactcttttatctgtaacaatgatcataactgaactactgaactggccagcaaaattaatgtcttgatctgccactcaagcagtatttagtcattattttcaaatgactaaaattaaataaaataaactatacctttgagaatcattttaactgaagtagccagttataagggctagccacaggcagtgtttacaaaatgtctctttaagaggtgtaagattatttcagatccacaaagaaaaagcagcagatggtcctgcttttcccttgtatcacttgaaacatacaagacttaaatattaagttaaaagtgtattgagaatacttcagaaaacaaatctatgcccaaatcactccttaaagcatggaaagaaaaataatgctaaagtggaggaaaataattaaaagtggaattccctatatattctaatttgcaagatgaagcttcactcttcctgcaaaatactacattatgggtatgaagacgccacaccagtcctaaccaaaacatgtctcagcccttctccagccttcaccaaatatcacattgccagcttctcttttgtcatgtccttgcacttccacaaattggatttcccatcagagtgttagtacactctgatgaactcaacaaagcagaagtaagaaaaaacaactttaaaaatgttgtttttatattacaaagcaatgtttcaaataaatgttattcaatattactgaaatggcattgaaatagtcataatgagaaaagtgagaacttggttgaactttcttatactggttttacaatttaattctgtgttagtttgcaatacattaaaaaaaggaacgacagaatctttcaaaatccttggtccagtcctactgcacaaacacaagcacctactgcctcccttctctcccgttagtcaatcctaagccttgcctgagaaatatcagtgattctgtcaaatactacagactgctctctatcctgagtgccttgagaaggtctccagctattccagtgtcacctttgacaggaggcaaaggtggtaagcaaaggtgtcaaggccctgtcatccattctgccttgtgtttctttcatttcctgtacagggtaactgctcagaaaaactcaactatttctcacaggacaaatcatataaaaccttacaggattaaaaaaagagagagagaagcgcttgtaatgaaaagaaacgaaagaaataataagagaacacacaagaggaaaccagtcacacccattctctctagtgctatgtagcttaacccacacccaaagtaaactgccttcacttcaagaagctgtctctctgtaaataaactgaccaatgtatctttaagacataaacatcttggactgccataataaacattgcaaaataaatacaaaataacatctggaggcaaagctttgctaggagtggggtgagagggagtgctagcttttcttagcaccattaataaagtattaatttcattttcttttagtttggaaaatgctttccattattaaccaaaaacaaatcaaagacttactgattttactttaaaatccaaagaatggaatactgtctgtccataatggctttttgcaagttgggcttatcttcttagttatattttaattcccttgttttctactgtttgaaactagcactcagtcaccaagcagttaatttagatatgaaaatggtttatatttaggtctaattattactgtcctgttacataaaaatcttctttctgtcttgggaaaccaatttctccaatataatgtaccagaaaaacacaatacttccattgtaagagtatattataatgattatgacattcaaccattgtttctcattgcaatggcagagaccatgtttcatgcacttcctatcagcatccgacttatgtgtagttatcccattcaattaacatttatcatcggcaaacagcaactggtccagctctctacctgtacaaaataattacatcaaatgcttgagttgctcctagtaaattttactataatattattatgtagataattgccctaggaattacttctcttattttgtgtaatgctctggtaagattttttgtaggtgacatagaaagcattgtattccaatgccaagaaaaaaaaaaaactcattagaaatatatgtaacttacagccaggcgccatggctcacgcctgtaatcccagcactttgggaggccgnnnnnnnnnnnnnnnnnnnnnnnnnnnnnnnnnnnnnnnnnnnnnnnnnnnnnnnnnnnnnnnnnnnnnnnnnnnnnnnnnnnnnnnnnnnnnnnnnnnnnnnnnnnnnnnnnnnnnnnnnnnnnnnnnnnnnnnnnnnnnnnnnnnnnnnnnnnnnnnnnnnnnnnnnnnnnnnnnnnnnnnnnnnnnnnnnnnnnnnnnnnnnnnnnnnnnnnnnnnnnnnnnnnnnnnnnnnnnnnnnnnnnnnnnnnnnnnnnnnnnnnnnnnnnnnnnnnnnnnnnnnnnnnnnnnnnnnnnnnnnnnnnnnnnnnnnnnnnnnnnnnnnnnnnnnnnnnnnnnnnnnnnnnnnnnnnnnnnnnnnnnnnnnnnnnnnnnnnnnnnnnnnnnnnnnnnnnnnnnnnnnnnnnnnnnnnnnnnnnnnnnnnnnnnnnnnnnnnnnnnnnnnnnnnnnnnnnnnnnnnnnnnnnnnnnnnnnnnnnnnnnnnnnnnnnnnnnnnnnnnnnnnnnnnnnnnnnnnnnnnnnnnnnnnnnnnnnnnnnnnnnnnnnnnnnnnnnataaacttgttaactatcaggggaccagtaaatgccttccatttagtcaaataaatatgtaaggatatttaatctcatataagtgttttttaaaagtatacttgtctctctttccataggaagtaatgtctggcagaggaaaactgctgagctatgtctgagatagtttcatctgctcacaggctgctcctgatggcacatatttattgtgtttctcacatggcctaaactataccagcaaaatgaggaattcagttttccttttaaaaaattttccttttgaaaataacaggcattttactaaacattcctttttttcttattttgattagccaaaatgccagttgcaggcaggctacataaaggatattctaaattccagaccctctttcatcagatattgcaaaggttgaaagtaagatcaaatttacccaagccacaagttgtaataaatttaaaagaatcatctttggcttccattattagtcatttcctctctttcaacaaacaataattcaacaaataaaaattttaaaagttctgtctattttaggctttgcagatagaaagacttgcatttaaatctctttattattgaccgtgcactcttggaaaaataatttatttgattctccatatattcatatataaaataaatataatatttttacagactgtatagagttgtgaagattaaaggaaactatgtggcatgccaagtatgtactgggttcccagtaaattgctactaattaaaatgtatgtgctttgcttaaaatagaatttccaagtcactctgaaacagaaatatcgatatttctgttatatataaatatatataaatacaatcatgtaaacacacatacatacacatatatttccttcaataatcaatctttctataatatttaatttaatcaataggtatttacagtatatctactgttcaccaggcaacatgcttgatacagataatacaaatccacaaaataaaattcttgtctttgaatcttcctactaggagaaacacataagatacccaaatgctatgagggtattttacctaagtctgtgcctcctggtgcggaggtcaagaggaatgagccccta

SEQ ID NO: 17 - DNA, 1614 bp, Homo sapiens
ccctcccccctccctgccctcctcctcctcctcccctatgtggtgctcccgggagcccagcccaacactggagcgtctcctgctcgcgcacgccagaagcagctcggggtctctccgccgccccgccgctcgcccgcccggatcccgcctgcggcagttgccgcacaacatgctacctgcggccgccccggcggctcctggaaccccggttcgcggcgatgccagccaccccagcgaagccgccgcagttcagtgcttggataatttgaaagtacaatagttggtttccctgtccacccgccccacttcgcttgccatcacagcacgcctatcggatgtgagaggagaagtcccgctgctcgggcactgtctatatacgcctaacacctacatatattttaaaaacattaaatataattaacaatcaaaagaaagaggagaaaggaagggaagcattactgggttactatgcacttgcgactgatttcttggctttttatcattttgaactttatggaatacatcggcagccaaaacgcctcccggggaaggcgccagcgaagaatgcatcctaacgttagtcaaggctgccaaggaggctgtgcaacatgctcagattacaatggatgtttgtcatgtaagcccagactattttttgctctggaaagaattggcatgaagcagattggagtatgtctctcttcatgtccaagtggatattatggaactcgatatccagatataaataagtgtacaaaatgcaaagctgactgtgatacctgtttcaacaaaaatttctgcacaaaatgtaaaagtggattttacttacaccttggaaagtgccttgacaattgcccagaagggttggaagccaacaaccatactatggagtgtgtcagtattgtgcactgtgaggtcagtgaatggaatccttggagtccatgcacgaagaagggaaaaacatgtggcttcaaaagagggactgaaacacgggtccgagaaataatacagcatccttcagcaaagggtaacctatgtcccccaacaaatgagacaagaaagtgtacagtgcaaaggaagaagtgtcagaagggagaacgaggtacaatcatagaaaaaaaggaagggagaggaaaagaaaaaaacctaataaaggagaaagtaaagaagcaatacctgacagcaaaagtctggaatccagcaaagaaatcccagagcaacgagaaaacaaacagcagcagaagaagcgaaaagtccaagataaacagaaatcggggattgaagtcaccctagctgaaggcctcaccagtgtttcacagaggacacagcccaccccttgcaggaggaggtatctctgagtgtgcagcacagaatcgcatgacccaccttaaccttcctgttgtcatggaaggatgcacggctgctctgtccactgtgattcctagccctctcaagatcactgctttctgaagaatttgcaatgactctggcttctggctgcttatctctggacacccgttctccaccagttgtacagttcatgtaatctacttggcttaattgattttccacttctctcttcctcttctaagatataaacattttaaatgattt

SEQ ID NO: 18 - protein, 274 aa, Homo sapiens [sequence omitted]

SEQ ID NO: 19 - DNA, 23126 bp, Mus musculus
  misc_feature (1)...(23126): n = A,T,C or G
gctttgtgcttggactcactcactcttgctttctgcacattgtctctttgtaaactctctcttggcctgctcagttatcctaatttgtttaagaaaaacataatttcatcaccaaatggaattaatttaggtgaagttctagtctgattaacaagcaattgagcctagcggatcctgggcagccttggagatgggttcttttgttcaagggatggcacacagaaccaggaaatcctgcccttgtatagacacttctaggtccttcacgaccatgagaaaagttacagactccttttctgcggaaaaaatcacacatacgtctaatttaaattgcaagctcactgtggatgctggaagacagacagacagacagacagacagacagacacacagtgggggaagggtggagaagagacatgtgttcacgagtgattcagagcttggtgtttgtacagagagggcctagttaaggggtgtggatgcttagagggatagcagggatgttgaagaagagtgttgtcttctcagaaccatggttaggataggaaagaacctcctaggggatgtatggcctctaataggggccagaggcaatgagagctggtgcctgcctttctcctttttatctgcattgtctcctatggagcaaagccagctggtgccagacgactgactgggatgccattgcatgccattgctaccgtcatgagtattcagggaacagaggaacctggtgtctcagcttaggaattaaatacacacacttcaaagcaatctagaagttctgtgtttattttaatggtacctacaccgacaaatcacagtattgagggatacctgtctgttgttggaagtgaggatggccttctgttcatggataactcccctaaacactacttggatttttaaaaaaaaatgttagttgatacacacgtttagagtggttttaggccaattaaacagtgaccagaggggcttgggcaatggtttcatctgtgaagtacttatttcaaaagccagaggacttggttttgaatccttagaacctatatatggaactgggtgtgccagttcacgttggagactcttgttatgcagatagaggagggtacatgggtgatccctgtacaggcataccctatgtagcccaggctgccctcaaactagaaacatccctcatacattaatctccccagtactgaggtcataagcaggagtcacagtgcccacctctccttacatgtgcgtgcgtgtgcatgagtatgtatacatgcatatgtgtgtgtttatacatacatatatgtgagcatgcatgtacatgttcatgagggtacagacagatccctgaggctctacggccactcagcccaatggaataggtgagctccaaggtcaagtaagtaactctgcctccaaaaataaagtggagagtgattgagaaagacacctgtcctctgaatgtacacctacagacacatgtgcatatgtacatggacacacacaactacacagacacatgtacatgtacacagtacactgtgtccagtgagctccagtgatcctcctgtcttcaccccgagccccagtgttggactctgacacacctcgttttatgtggcttctgggaagccaaactcaggttctcatgctggcaacagcaaatgctttatccactgagccacctccccgtagcctgggttttgacaatggtctactgcctgctacctctggacagtatcacacagaatggattcacagttgcaagtatcctttgggctaaatctatttactccttcctcccctccaacctgtggcattcatagatcttatttattgtcccacactttgtttattctagaatgtctgaggctagagttataccggaagcagcctgttgagagcggcttctttcacttatcatcatgcactgaaggctccctgtgtctctttgtggcttgatagctcacgtctttttatttctgagtaatactcaactgtctagctgtacccgtgtttgtttattcttttgcatactaaagggtgtctcagccgcttctctgttttcaccgtgacaaaattaataattaataagcagatattaatcatctgtgtgcaagtttttgtttccagcccatcgtagaacgatgacctcttgcttctgagagtcccaggagaggacatgcagcatacaagggtcacattaggatcacaccctcatgtatcccagtccctcttagaatgagttttccaacagctccaaaagaggaaattatgcaggaatggaaagatctcaaagcctggagaccacactgggtggccaagctggtgactgtggtacaagatgaactgaaattaggtaacgctgtcatggaagccactacttctgcatccagttccttccaacacacttagcaactccatgggtccctccactgccccctcatgcatctcaccttggatgtgaattttgcaaactcatctgggctttatatttcatctctgccctggtcccctgaggggctggcttttctcactatcggaagctttgaaaatcaccattgctactttggtcctacgtgtcttctcatctctcctccataaaatctttgtgtatccagaaagccaaacgactttactggagaatgtgacccttcatgggcacacaactggcaggacagggatagaagccctgttttctgtgtgatagcctttgaaaggatcctttgacattgggtctaggtgactggacaatctaaactctgctcctccttcccataccgtcccctcaatcctcccatccatccaagtagggacggtacaactagcccttccttgattaaaatcagctgtgtcccatacagttcgccctggacaagagtgttggtctcccagttgaagggtatcatttgtttggtctcagcaggcatcagctatgattacagattagattcagacagccaagctggaagagcgcactgtttccaagggctgagcctcctacccatgacagtcagttccggctgagatttttgttctccccaataatgggcttgtttgctggagccacctgtcactgggcttcagctccccagctacctgctgggacacttccctcatgtagcttcttccccctctgcagggacacagctctgtaggaggatatcagggctgctggcttctcccaggcaaaggtctctgtgggctgtcttcccctcacttcaggacacttgctttttgcagactgcctggcatggggtcccacttacctctccctcaactccccatgaggcaggctgaggtgggaagtactcctcccttccttctggctcccctcccttccacttcctccccacccgcccactgggactatcagagaagtgctaggagctcagattctgctcattacacttccttccttaggattagggctcagaactcagatgtcttgactctgattctgccacagggacttcaacagaaaccttgcccgtcaaccctcagacaccatttcagagccaaccggggtgggggtannnnnnnnnnnnnnnnnnnnnnnnnnnnnnnnnnnnnnnnnnnnnnnnnnnnnnnnnnnnnnnnnnnnnnnnnnnnnnnnnnnnnnnnnnnnnnnnnnnnnnnnnnnnnnnnnnnnnnnnnnnnnnnnnnngggggggagcagcccttgcctcctcctcctcctaggcccaggaataccagacagagcctgaggtagtactcaggttccaggagacaatgtctcctgtagcagtctgaggcagtcagccccagatttgttggcactctgttcaatggccaaacctaaggggtgacacagccactgggcaacagtatactccactacagacagccttcctaattacctctccctgggagccacagtagagtcacatcccctgaatggaacttgaggggtgggtgaatggatgctgggggatgaagggagaggcaggggagggaagagccactggataatagttcaaaacattatactattttttaatgctattattgaaaacacagattaatcaagctcttctccatggtagatgcaggcataaattttttttcacataaattatttcacttaccagtcctggtggtacacatctgtaaacccagtatccagagcgctgggactggaggatggcaaattccaggccaacctggactccacagcaagaccttaactcaacaagaacaaagaaaaggaagaaaagagattgagttgggtgtggtggtacatgcctgtaatcccaaccatcaggagactttctaaacgtgttttgaggcggggtcttcctaggtagcttagacaaacctcaaccttgagatcctctcatctctgccgctctaatgcccatgcttatttaattacatgtatttatttgtgtacgtgtggacgtgcgtgtgacctgtgcgtatatggacatcaggggacattcgtgggagtcagttctcttcatccacatgtcagcctcagggatgaaattcaggttgtctgccttggcagccagggcccttacccactgagccaccttttaggtccccctcattttaaagttgagaatttgaactatcacattgagttctaaagagttctgtgtatgtacatgtctgtacatgtttgtgcccacatgtgtgcatgtgtaggaagaccagaggtcaacactgagtgtcttcctcaagttctttctgctcattaacttttattactttgaagtttttcatttattattactatgtgagtgcatgtatgtgagtgtgtgtctgtgagtgcttgtttgtgagtgtatatatgtgagtgcatgtatgtgagtgcatgtatgtgaatgaatgtatgtgagtgtttgtatggtggtgagtggtgtgcacatgccacagtgttgctgtagaggccagaagacaactgtatggagtcaattttttccttccacctttatgtgggtcctggggttcgtttctaaggcatggggcttgtgtagcaagcatctttactttctgagttgtgttgctgcccccctcagctttattgcgacagagctggagctcactggttcagctagagtgactggccatcaagctcagaggatctgtctgtctctgcctccccagcactgagactgcaggcatgcaccactgcacctggctttcacaacaggctctggggatccaaacccaggtctctgtgcctgtatggcacacacctaagcctcagtcttatgccctttctaccaccagatcttatacttcctcccattgtgtgtctcttcgctttcttgttagtgttcttaatacacacatgtcttactgagtcaaagttttctacttttccttttgctggctgtgcctttggcgtgtattttggagccactgccacatctgaagtccagatttaactctatgtcttctaagagtcttagagcttttgatctttcatttttgtctctgatctattttgaattattcctttgcatattacatgaagcagaggctttaatcttttgtgcatgtatatatgtaaggcctcaagttgtaaaacttaatagctaaaggggcttggtgagaaagtctggtgtcatgagttcaatcctggggactcacataaaagcagaaagacaattgattctgcaaagttgtcctctcagctttatgcacccacacacatcatgaacacatagtaataatagttttttaaaaacaatatatgtaactgtaatatcttttctttcaacataatctattttgtagcctatttttattttattttatttttttattgtctattttctttatttacatttcaaatgttatcccctttcctggtttccctccctcccagaaacaccctatcccatcctccctccccctgcttctatgagggtgttcctccacccacccacccactcctgcctccctgctctcgattcccctacactggggcatttatcaagccttcataggaccaagaacctctcctcccattaatgcatgacaaggccatcctctgctatatatgcagctggagccatgtgtactcctttgttgatggcttagtccctaggagttctggagcgtctggttagttgatattcttgtttttcctatggggttacaaactccttcagtcctttctctaactcctctattggggaccctgtgctcactccaatagtgggctgtgaacatttgcctctgtatttgtcaggatctggcaggggctctcagaaaacagccatgtcaggctcctttcagcatgcacttcttggcatctacaatagtgtctggttttagtaattgtatgtgggatgaatccccaagtggaacagtctctgctcaacactttacctccatatttgctcctgtgagtattttgttctccttctaagaaggaccaaagcacccacactttggtcttccttcttattgaacttcatgtggtctgtgaattgtatttggagcatttaggctaatatccacttatcagtgagttcacaccatgtgtgttcttttgcaattgggttacttcactcaggttgatattttctagttctatccatttgcctaagaacttcatgaattcatcgttttcaatagctgagtagtactccattgtgtaatgtgtaccacattttctgtatccattcctctgttgagggacatctgggttctttccagcttctggctattataaagtaaggctgctatgaacatagtgaaacatgagtccttattatatgttggagcatcttctgggtatatgcctaggagtggtatagctggttcctcaggtagtactgtctccaattttctgaggaactgccagactgatttccagagtggttgtacacttgcaatcccaccaacaatggaggagtgttcctctttctccacattctcactagaatctgctgtcacctgagtttttgattttagccattctgactgctgtgaggtggaatctcagggttgttttgatttgcatttccttgatgactatgaatattgaacatttctttaggtgcttctcagtcattcaatattcctcagttgaaaattctttgtttagctctgtaccccatttttaagggttatttggttctctggagtctaacttattgagttctttgaatgaattagatattagccctctatcggatgtaggattggcaaagatctttccccaatctgttggttgcctttttgtcctattgacagtgtcctttgccttacagaagctttgcaattttatgaggttccatttatcaattcctgatcttacagcataagccattagtgtcatgttcaggaattgttttcctctgtgtccatgtgttcgaggctcttccccactttctcctctataagtttcagtgtctctggttttacgtggtggtccttgataaacttggactcgagctttgtacaaggagataagaatggttctatttgcattcttctacatggtgaccaccagctgaaccagcaccatttgttaaaattgctatctttttttcccattggatagttttagctcctttgtcaaagatcaagtaaccatacatgtgtgggttcatttctggaacttccattttattccattgatattcctgcctgtctttgtaccaatatcatgcagtttttatcactattgctctgtaatacagcttgaggtcagggatagtgattcctccagaagttcttttattgttgagaatagtttttgctactctgggttttttgttactctaaatgaattggcaaattgctctttctacctctacgaagaattgatttggatggggattacattgactctgtagattgcttgtgcaggcttttactatattaatcctgccaattcctgagcatgggagatctttccatcttctgagatcttcttcaatttctttcttcagagacttgacgttcttgtcatacagatctttctttcacttgcttggttagagtcacagcaaggtatgtaatattatttgtgactattgtgaagggtgtcatttccctaatttctttctcagtctgtttatccttttgagtagaggaaggctattgatttgtttgagttaattttatttctggccactttgctgaagttgtttatcagctttaggagttctcttaaatctttggggtcacttaagtatacaatcatatcatctgcaaatagtgatattttgacttcttcctttccaatttgtatccctttgatctccttttgttgtctaattgcccttgctagaacttcaaatactatgttgaatggatagggagagagtgggcagccttgtctagtccctgattttagtgggattgcttcaagtttctctccatttagtttgatgttggctaatggtttgtagtatattgcttttactatgtttaggtaatggccttgaattcctgatatttccaagacttttaacatgaaggttgctgaattttgtcaaatgttttttctagcatgtaatgaaacaatcatatgtttttttcgttgagtttgtttatgtagtggattacattgatggatttccatatattgaaccattcctgcatccatgagatgaagcctacttgatcatggtaaatgatcattttgatgtattcttggatttggttggcaagaattttattgcgtattttttcatagcctatttataaaatttccttttctttttcaatttcttaaaatatggcattgctatgtagcccaggctggcctggaactcataatcttcctgcttcagcccccaactgctgggattccaggcatgcactattacatctaccacaatttgcctttaagtgaggctatgatttgcatctggctcacagacttgctgggaaatccaacagcagttctcttgagcagcacttgctcccagtggccttgttacccagtgtggtgatgctgggaaggagcacagataacctgctgaagaccgcagttttcaggttccttgagggaaacttgagtttccagtgagtggtacaatgtgcacacaagcttaggtgggggggggggtgtcaccagcctactggaagtcatctgactttcccttcatgatttgagaatgaatgtagcctggtagtggtctatctgctcctcctggaataccagcaactgacttaatctcaattgtatcaggtagggatttgagtacagacctaggcttcatcctgaagttggatgagaactccttggaatgccatgacaccaaataaaggattcccatttatatttgaacttgacaacatcgtaatgttttagcatagacacaactctttgggtgcagggacaagcttatattatgagaattttccatgtaatatttgggccaagcttccatgcattcagaggatgatgcacaatttttatgaaattcaaatttgtctcacagccttgcattttagtttcataatctaggaagctccaccctaaccctagcccaccaaggtcggttcttactgtagtcctcctgatcaaagactcggaacgtctgagtgagaagggccttactctggacatctcatagatcttgcatcctgggcaagaaagggatttgaacttgctggagtagtcagtgtggatgttaaccacctcaatggggtgctcacctgtgtgtgtgtgtgtgtgtgtgtgtgtgtgtgtgtgtggccctgttgaatgctactcaagtgttctattactgagctacatccctagctctttttgtatgttttattttgagacagggtctcactctgtcatctaactagaacctgtaatcctcctgcctcagtcccttgaatagctaggcttacagtttggcaacaccataccttccttaactgagtggtgggggattgttgtttgggttcacagagggtactataataccttctattggggagaagagagaccccatagtaagtgtggttctcactcacaggttgacataatcctggaccacgcagatgatgaggaatggaggcgtcagaaccgacccaccctaccccatcggccacggaccagccagcctctgtacccggcattccagggggcctaggggggcaggcctcacctcgcctgaccctgggtcctgttatcctgccaccagagcagggcctggccccaactgtgttcttgaaggcattgcctgtccccttataccacacggtacctcctgggggcctccagccacgtgcacccctggtgacaggcagcctggagggggccagcgtacctttcattctcagccccttgctgcagcctgaaggacccagtgccacccaggtgggcaagccagccacccccgccctgactgtgaacattgtaggcacattgcctgtactctcctcgggtgtggggtctgcactggtcagcacaggcagagtgaagaatactggtaagtacctgtgcccccactgtggccgggactgcttgaagcccagtgtgctggagaaacacatccggtcccacacaggtgaaaggcccttcccgtgccctacctgtggcatcgcctttaagacccagagcaacctgtataaacacaggcggacacaaacacatctcaacaactcccgcttgtccttggagtctgaggggagtgggagcagccttctggaggagggagacaggcccggagagaccgcctcagtggatagtcgtggagatgaaggtgctccagagagagccctttccccaggtgccctccccgcccttgctgctcagaacagggaaaggaaggtggaatcggctccctctctcggggccaccctttcccacagggaggcctctgcggatcacactcagatggtgtcacctgagttttcactagccagcccgcagcctaggcggaagctgccagaaccaaagccatgcttcctgcagcgacagcaggagacctgttcagagaagccctgggaccccaaggccttggagggccagctgaggaagtgtgagagcacagactctggctacctgtcgcgctcagacagcgtggagcagccccctgttgcctctagcccattgcatagtctatcggagcacagtgcggagtctgagggggaaggaggccctggctgttcctcttccggcaacagggctgaacgaggaaccccagggcccagcctggagttagagaagaagaaactggaggaacgaattgcccagctcatctcccacaaccaggcggtggtagatgacccacagttggaccatgtgcggccccgcaagactgtgctgtccaagcagggcagcatcgacctgcccatgccatatacctacaaggattccttccactttgacatccgggctctggagcccagccgcaggagggctgccctcagcccggcccgctccaccttcacacccctggaaaaggccagacctctctttttccactcagtccccacgcagctctccactacagtggagtgtgtccctgtcaccagaagcaactcgctgcctttcgtcgagggttctaagttgtggccagagcaacgggacccacaggatgctgtcccaggaatgcagaaggccctgagccccaggcccaccccagcccggctgggatgccgcccaggactgaccttggcaagcatctccagtggtcacccacgggccctggtaagacaggctgctgtggaggacctgccgtgtaccccgactggagacccttcagccgctgctgaggaactagatggaaagagagctgtggcaaaggagggtgtggtgtacaagggcagagccagtaaaaagtgtagccagaggaagcaaaggatgttctcccaggagaaatggcaagtgtatggaaatgagactttcaagagaatataccagaaaatgaagaccaaccaccagggaggacagaaacacaggcaggtgaaacagggccaggggacagaactggactttcctcctcctcctcctcctcagaaacaggggggaggaggtgaggatacaggcctgtctcaagacagtaggatccctatccttggagacactacagcaggatgtaagctagagtcttggggaagtagaccatccctggaagactcactggaggctgagtctcctaagcaactgaaggtggtgaccagagtcaaatcatctcctaccctcggcagcacagatagcctctgtttgagtggcaagagctctttgctctctccaagtgggaaattagatctgggatgccagccgcctccggtgcctacggcttgccaagcaggagatttagaagctcccgagactgcttcaccagactcaagtggtgaggctataaaagaaaccagccctggagcccaaaccgtcctcagacggtccagtgatgggtctgtggctctacagcttgcagaagacaagttaccttcagagaggaagagactgaaggtggaagggctggaccatcaggagcagccagggcctctggaagctgatacctcaggaggctctgtgcaggctgaccccccaccgtccgagagacaggacagtgactctgaggagttgctgggttgctcaaataagagtaccctgcatgtgaccacagccccggagccctcagatgtctcctcagccgcttctcctgttgccctgcaatggccagggataggggacaaggattccccattgccttctgtacccaggactcctgggcttcactccctcttgcctgctcagccccaggatcctggtgtccctaatgctcggtcaggtggcttctttcctcccaagtacctcctcaggttacctcagggagagaacccctcaccgatagttgctgcagggcctgaaaaaggctcagactctctgtgtacaagtacacagcctgtagaacaggcccttctggttggatcagaactcggaatgctccggccacctggtgcatactcaggcccaggtgaggcaggtggcagcccagacgaccctagctggtccaggttaagggatggaaaagaagaggcacagacaggaagagagaaaagagataggaccaaggacaacatcctagtggttgggcactctcctgttccaattaccagcaccacccaggagatagcctccgttctgtctactcacacctgtgacattcgggtggcccaggatgtagtgagtaagacccatgccatccattgcctctgcacagacagcccaccagcaagagctaggacatatgggaatctcttaaacccttggacatcatcccagaagctggggataccgcccaagagtgccctagaaggtcctccttcagaaaccaaggaagggctgcctgctttcttttcctctcaagcacactatttccttacaacttttacaaaaccccaggatatttccttgaaccagcagaaaccggccttgtcacacgtcttaggaacccccaggagctgtgaggccccaagctccttcccctcacttaagactgaaccccagctcacatggtgttgcttaagtcgaagcctgcccctgcctgcagagcagcggaggatagctcctggacacttggcttcatccttgcctaatagaaacctccagggcgacagtaacaaaacactacccaagagcaatggaggaaggacccagacaagccaaggaggagaagtgtctacacaggcgcctgaggtaacaccagcttgtcctggggacagggtcagcatgacagtgagacacgaagaacaagagagagggagaggagagagagagagctcctgaatctatccttgtggatatcacctccattaggaggtcctctgctgccaagagaggctagcgctgtcatacatgggctgggaaaaaataaaggccctagatatgaacaaaactaaacaaattcatgaaaataacatagtaaaaaactattctactagagtctgagtcatagctgagttggtaaagtacttgccatacaaccatgagggccagagaatccacaattaaaaagccaagtaggatggcaggccattctaaccccagcactggggagatggtctctgggggcttagattagcctagccagtgagtctcagaccagtgggagaccctggctcaaaatataagctggatggcttctgagaaatgacactcaagattgttctctagcctccacatgtgtgtgtacatgcacacatacacacacatatgcacacacactacacctgagacttgaaagcattcttgcttctctccagggactaagggtgaggatccaaggtgtgatttaaatcttccccttcgaaattgtagggattcctgagtggtagaactatggatgatggttaattctccactcacatcaaaggtccagcatttccactggaaatccagctaggtatagttctggatggttccatgtgacacattaccagttgcctggtaagagtactgaacaggctcagactatttagtaacaacattttggtgtcttaatttctatagaataggcatcctgtctgttgagaaagagcccatcatggtggtccccaccatgagggctttgagtgacatgatgccaacatgcctggtattttcagcttccctatccatcagtcccagagctgagggctgaggaccaagtatccaggccacggtggaagaaagaacaactatggcgtagaaaggtgaagacatctcgtgaaaacaccaaacagaagaaactgaggcttcattctaaaaggtaagatatgtggcctccccttccccttccctgctagcctagtatgaggagctgcaaatggctacttagccaaaccctcaagaactgaatgtggcattaaatggcagattagctccagagagaggctcctattctattggtctggaattctgaagctccagatctgcctctgttgcccatagcccatccagcatgatcctattgaccatgtaattgcttactggtatatttctaagacagaacacagtaaatatttgagataaccaagttgaaaatccatccatccatccatctatccatccatccatccatccatccatccatccatccatctatccaatgataagagagtatgtgttaattattgcttttcagacttttttttttttttagtatttgcaagaaatgtgtatttttgcagaaaaaaaaatccagagaagcaaagagaatctttcagcaatcccaaggcttggggatattcttctaaacattcagaggcactatttctagacaagtccagaggcattttttaggaggctttaagagctcagcaacagctctcatgctaagtgtatcaagcaagggggtctgtctaaaaatcataaaaatcagatttcatgtaagtgtctttattttccactcatctgaagttatcagaattttgaggacacaagacttgtcttcttgagtggccacagctggccagagacaggtagtagccaccctgataggtaagagctgttttttgaatatcccagttccctacctctcttcagtactggatcctcagctatgtttctcagctatcttacatgcctatctccacagacaattaaatttgaagatctttatcttaatagttgaccttgagggaatcaagagagggcatctttatcaagaaagtgctttaaaagatcctcaaagttgaatatgtggagttgggcacaggggagcaaggaagctctgtacaaggtccttgtcctagttaccttttaattgcttgataaaacaccatgaccaaggcaacttataaaaacttataaaaaaaaagtacctaatgtatatatatatacatacatatatatatgtatatatatgtatatatataatgtatcacattcgtccatctatctatctatctatctatctatctatctatctatctatctatctatctatctatctatctatctagttgtccactatccatcttcctgacattgttgtgaggtattacattatgtgaatgaggctcacccttctttgatgcttgttaatgttagctgttttgaatcttcaaatgatgaatataatatataggatcctgtgagagtctagatagtatagattctttacatgttaaaagctgtgtatacattcttctgtctagcatttagtttttaaagccattttattcatcttggcctatggaattgacccatatttcatttctgaatgcattttggatcatccttctagtattttcttcagaattcctgcagaaaagaatactgccctggctgtcatcagtttgaaatagctgcattcatcctggtgttgggcagtatttcttctggctacagggctctagataaacattcctcttttgcttgggcatcaaggctcttcttccaccatctttagtttctgttttgttgaaatctgccatttgccacttctctgtctgtggaatgtctttaggtttggttgctgctaaagctgtttctttagtgtttgtgtttcaccactttactgtgacacttggagatagaggttacactttatgtagcccatccagaatctgctgggctttgatgatcttcctagaaaatcctttgcccatcatttctcaagcaccatttccaccccactctctcctttccttcgaaacacagaaaagtaatgtttcttagactttttcttctgtgtgtgtgtgtgtgtgtgtgtgtgtgtgtatgcatgttcttgtgtgtggtacatgtgtatgaacattcacatatatgctggtgcatatgaaggccagagatatatatcaggtctgttctcagcttcactttatttttgaggcaggctttcttactggcctgtaccttgcccaggcttctcctcatgtgtgcttccccagagctcagattacaagtgcatattattattcctgtttgttctttggttttgtatgtgtgtcctgggattacagctcaggtatttgcacagcacaggtcttcatgtttgttcaacaagcactttgccaactgagacatctctccaacttttttttttcttttttaaaacagggtcttactgtgtagcccaagttggcctgcactggtgattctcctgcctcagcctcctgaatatggtcttacagaatgcaccaccagacccaacttgcatgtcttctacctttaataattttggtgtctctatggctacacaatgagtggtatacttaaaattttactaatttccttaattcattaaataacttctctgttgaagctttattaatgtataattgagttttaataaattgcatatctttaagacatgtaattgaattaattttgacataaattcgtaggatgccaaaggtagaaagtctccatcatgtctttataattcctctcttctcttcaacctgcctctccttttcccagtgaactttaatatgcttctatcaacgtagatttgattgcttcttctagactacaagagaaacaaactcactctctctgtgtgggagttgctcttctctggggttagctctcccagacaccttgattatcttgggactcatcgattcactgggtttaatttctgatgctataataaaacatgataaaaaatgccaaaaatcatcttaagggctaaagaatttatttcagttcacagttccaagttatagtctcttgtagcagggatgtgaaggctacagtaacttgaagcagtgctcacatgactgtcacctgacacccaccttcaagggcagagagaaaggaatgcatgctccctcactgctcacttgcttgcttgtgctggcttagcttgagtttttcactcttacacagccctggactcaacaccaggaagtgatgtccactctgggctgggtcttcccaggtcaattaacataagataatcccacatagactgagtctccagtcaacctgacctaattaattaattcctcattgtgattctcttcctaggttattttagggtgtattgagttgccagttaaaggcgaccaccacatccatgttgtatgcataaacactttaccccttcttgatcgattcatatgactgaggacggctggggttcagctcatgtttaggtagtcatatcggtgaaagtttcagaagctaaacccatggagtctcaactacatgactgactaaatatttttaggtttgttttttttttttaaagacaagtgccctctgaatgtgggactgtgggtatgtgctgccatgcctagcccaaataattctcttatttacttatttagattcttgggattaaatccatacaaatgccaggcaaatgctccacactgtgctacatcctaattaccagtttttatttccctcatgctatatcttaaagagtaatcatcttcaattttgacgaaatgcattttcttcctttccccttttcgttgtgttttctctcagtgtaaaatatctgaagtttctttctgaccaaatcacacatttctcctaccaccctgtacctcaggctccacacctgagcctgggatccatgttcacttcgctctatggtatgagttatggattgaagctcagagttttgcaggtagccatgtgctagccctaacatgatttatttgtctgttttgatgcaaatatcacaccattttgattataacacttaaaccgaagagattctatgtgaggctggtgaattcaaagcagcatggtacttctaccaggatagacagagactgattagagagaccaggaggtgaagagggacttttgataagttttaaaggaaaatcagtggggaaaaggagaagggactgtctttccagccaacagtgcccagcctggaaagcagaaggaagctttaggtggcgatctcgtcggattctgctctaaggagcagcaactttatcccacagtgcctgtcagtccatacattgtccagactgtaagtcaaattaatcatttctcatctccaccagaggtctgtagcctcccatagcggtttcctattcattgacatcctgtctttactggtctgaccttttaaacagttttattacatttatttgtttgtttgtatgttctgtgtttaggtcagaggacaatgttcgaggcagggtttcttattccactgtgtgtgtcctggagatggagcttaggtgattaggtttagtagcaacacctttacccattgagagagtttcactaatctttaaatgtagttgttcctggatattaccttttatctgcaagaagcacatacatacagaatatgtcccctcatccttagaggtggggtctcactgcacctggagcttgtgaattcagcttggctgtctggcctccttccatgtccaactccccagcatgggcatagcaggctcccacaatttggcttttgtgctcatgttgaggatctgaactgtttagcatggcagataccttgttgacttagccatctctccaggccctcagttctttaaaaaccacacgttagagtttgcacttgatgatcccagcagttaaagtccctcatgcctgcctctgtttacatattaattctcacttacagcaactgagtgccctgtgctcgtgatatgggaacactgagatctgggctgaaagcacacctcttggagtggagtggagacgacttgttttgcttctactaactctgctaggctctagtctaagagaagctcttgaagttaaggttttcctggtgtcagcccacaggaatcagggaaggtctcttctgtttatggaaccaactggaaggatttcttctcattcccgggggggggggtgtgggctgggggcactcacttttcagtcacaagcgtggtaagtgcatggcttgccaggggcctgaggtctctgcaacaataagaactccccccttgacatccactaaggtcctgtcccacccagctaggggacatatacaggaattacctggtctggagaaaccattgagatgaaaacagatttacctgctcaggttttcttcctttacaatgttaatggttttgtaccttccaaccagactatcaatacttttaaatctatttaatttttaacaacaacttaacttgtagttcagttggttttggtaaggagggctgtaatgggaccacagtgttaggtgagggctctgaacccaggagatccggctagaatttatttgctgtgtgccttcttgttaagaagttgttttaattcctaatatttttgaagctctgactttgctaattcgatcaagccaatctagacttttgatggggttcttaagcgctcagcatctgtgtgagaagttgcccacttcaatgtatccacgaagctgccttttcttcttcagttactcagtgatggtctgtcaaggaagtctttcctaattcagtctcccaatgtcatgagcaaataaagacttcctctgatacctttctaacatacataagtatacacagtcatatatatgtagaaggatttggttttatttttgtgatttagacaaccagggagcatggatcaaatgtgattttttttaaatttgttttatctagttataacataatgtttttgaaactgcatatatgctattagattacacatacacatttcacatatagagattttatttgattggaaaactctaaaacataatgtagaatttacatcagaatcaagggtccctcagctgtttgctgtttttagctccccgtttacactcaaagttcatttcggggcctttccgttcggtttcatttctctctccctctctctatcccagtgctgtgatgagaatggttccattaatgacaccgctcacgttaaaagaaagggagtcgaaaatacggggtccattttgagagcggtaatggaaacatgttgaagcttcttgctggcatgactaattacttagatgttaactcgaggcacagagattcacaaagttctcggaatacatctgtgccaggcccacagcaagcactggaccgtggaattgggttttgttgattaatttgtggctgtgtacaagcatgaagcgctcagagacttggctgaggaagcatccaggaagtgctaaatagatagcccccacagaggggagatgacaggtgtgtgtgtgtgtgtgtgtgtgtgtgtgtgtgtgtagggggctcagtcctaaagggcacacttggccctgaggacaggattctagtcatcatgaaggtctaccttgtgcatttgctattcttgtcttcagtcaagatggaatttactcagttgagaagtctgtgaggtaagatccacagtcaggtggacagtgggtctgagctcaggtggcctttgctgcctatgccccaccccacacgtgactgagaccctgtgacccgttggccacagccctagggctttgagcatggtcacagacacctctcagcttctctatgctttgacatgtccttagagccatgaacggaactgggagaaacagcaggacctagctctcccttggatgagcacgtctgaggccggcctgttcacccacttgccaggcctctccttagatctcactacagcagtatgttagagcaacagcagggctgatacatttcagctcgtcaagactcatgtcagtaacctcagccctcccagctcctgagtgaaccaaggacctccactccaaactgaagtccacaggctcatgatcttaacctagcagtcttcaggaatccctgatgcactgacctgggcaagaaacgctcactgtgactggtctccatgagaccaaggagcacagctatcctgaagcacatggcgaggacccagaggaagcagaaaggagtcttgcgtggagcctatggttcaaaatccgaaggggctgctttttaaaagtatgaaggagaaaatgggtcagcccagtgtcacagactagatgtgaacttagaaaactaagttgatctcaaactcagccttgaataggcagaagaacagggagtgagggaacaggccttgcatcatgtactaagtagatatgcacgtaggactgtgtgcatagcctcggtccttcaaaccagagcaagcatcctgagagcaacacccacgccaacacctgctggattctttagaaagtggggcttgggttgtaagtgagctcttaggacgaggctgtgaagagccagctgaaggcagggaaaggggtgtagagacacttaaggagtctggcctcagcctgggccctcaggacctctgaagtgggacttgtactgtacagatcatcctactttgaggtaaacatgtctgaaccacggtgcccccacaccagccagtcaggtgggaagtttcccaggtacgcacaagcaagtcaaagtccccgctggaccagagggtatgcacatccccaacgcagtggtagagatgggtagccccagggagaactgttagatggaacttcacagaacctggcatgccttagggttccctgaatgacagcagatgaaaaactgcctaaccaggtttttttttttttatgcagttgcatgtggggaggtaggggccctacacatagactcctctgaaaggattaagagagatggggacagctccagcccaaggctaaacaaagtatatatacaggttctccccaagtatgatagggtccagatcccactttgataaggagggccaggaactctactgacagaccctctcacccctttgattgaatgtagtctccaaggttcaggatgtgtgctgttcataaagactgcaagccagctgcagtgaccagtggtcttgggggcaaaggtgagcctgcatacttactggctgggtgacccccacaggtcccacctcccttctttcttttgtgtgctttgaaatcactcagcaggagctccagtgggctcagggggttatgatgagtgaagtagcagcctgccttccctcccctgatagctcttcggataaatcttgacaaatgggacagtggcttcagagctatcccctccaccctgaccccagaggatgacagctcctggtccaggctgggaaggcaagtttcttcaaatgtagacacccagtgaagaacaaaaaaacactctctcacggctggtgccaagagaaggcaacaccctagggcatgctgctgtgtgttgtttttcagtcctgatttaaaattcctagtcagccctggtggttgggtcttggaggaagctca

SEQ ID NO: 20 - DNA, 3066 bp, Mus musculus
atggaggcgtcagaaccgacccaccctaccccatcggccacggaccagccagcctctgtacccggcattccagggggcctaggggggcaggcctcacctcgcctgaccctgggtcctgttatcctgccaccagagcagggcctggccccaactgtgttcttgaaggcattgcctgtccccttataccacacggtacctcctgggggcctccagccacgtgcacccctggtgacaggcagcctggagggggccagcgtacctttcattctcagccccttgctgcagcctgaaggacccagtgccacccaggtgggcaagccagccacccccgccctgactgtgaacattgtaggcacattgcctgtactctcctcgggtgtggggtctgcactggtcagcacaggcagagtgaagaatactggtaagtacctgtgcccccactgtggccgggactgcttgaagcccagtgtgctggagaaacacatccggtcccacacaggtgaaaggcccttcccgtgccctacctgtggcatcgcctttaagacccagagcaacctgtataaacacaggcggacacaaacacatctcaacaactcccgcttgtccttggagtctgaggggagtgggagcagccttctggaggagggagacaggcccggagagaccgcctcagtggatagtcgtggagatgaaggtgctccagagagagccctttccccaggtgccctccccgcccttgctgctcagaacagggaaaggaaggtggaatcggctccctctctcggggccaccctttcccacagggaggcctctgcggatcacactcagatggtgtcacctgagttttcactagccagcccgcagcctaggcggaagctgccagaaccaaagccatgcttcctgcagcgacagcaggagacctgttcagagaagccctgggaccccaaggccttggagggccagctgaggaagtgtgagagcacagactctggctacctgtcgcgctcagacagcgtggagcagccccctgttgcctctagcccattgcatagtctatcggagcacagtgcggagtctgagggggaaggaggccctggctgttcctcttccggcaacagggctgaacgaggaaccccagggcccagcctggagttagagaagaagaaactggaggaacgaattgcccagctcatctcccacaaccaggcggtggtagatgacccacagttggaccatgtgcggccccgcaagactgtgctgtccaagcagggcagcatcgacctgcccatgccatatacctacaaggattccttccactttgacatccgggctctggagcccagccgcaggagggctgccctcagcccggcccgctccaccttcacacccctggaaaaggccagacctctctttttccactcagtccccacgcagctctccactacagtggagtgtgtccctgtcaccagaagcaactcgctgcctttcgtcgagggttctaagttgtggccagagcaacgggacccacaggatgctgtcccaggaatgcagaaggccctgagccccaggcccaccccagcccggctgggatgccgcccaggactgaccttggcaagcatctccagtggtcacccacgggccctggtaagacaggctgctgtggaggacctgccgtgtaccccgactggagacccttcagccgctgctgaggaactagatggaaagagagctgtggcaaaggagggtgtggtgtacaagggcagagccagtaaaaagtgtagccagaggaagcaaaggatgttctcccaggagaaatggcaagtgtatggaaatgagactttcaagagaatataccagaaaatgaagaccaaccaccagggaggacagaaacacaggcaggggggaggaggtgaggatacaggcctgtctcaagacagtaggatccctatccttggagacactacagcaggatgtaagctagagtcttggggaagtagaccatccctggaagactcactggaggctgagtctcctaagcaactgaaggtggtgaccagagtcaaatcatctcctaccctcggcagcacagatagcctctgtttgagtggcaagagctctttgctctctccaagtgggaaattagatctgggatgccagccgcctccggtgcctacggcttgccaagcaggagatttagaagctcccgagactgcttcaccagactcaagtggtgaggctataaaagaaaccagccctggagcccaaaccgtcctcagacggtccagtgatgggtctgtggctctacagcttgcagaagacaagttaccttcagagaggaagagactgaaggtggaagggctggaccatcaggagcagccagggcctctggaagctgatacctcaggaggctctgtgcaggctgaccccccaccgtccgagagacaggacagtgactctgaggagttgctgggttgctcaaataagagtaccctgcatgtgaccacagccccggagccctcagatgtctcctcagccgcttctcctgttgccctgcaatggccagggataggggacaaggattccccattgccttctgtacccaggactcctgggcttcactccctcttgcctgctcagccccaggatcctggtgtccctaatgctcggtcaggtggcttctttcctcccaagtacctcctcaggttacctcagggagagaacccctcaccgatagttgctgcagggcctgaaaaaggctcagactctctgtgtacaagtacacagcctgtagaacaggcccttctggttggatcagaactcggaatgctccggccacctggtgcatactcaggcccaggtgaggcaggtggcagcccagacgaccctagctggtccaggttaagggatggaaaagaagaggcacagacaggaagagagaaaagagataggaccaaggacaacatcctagtggttgggcactctcctgttccaattaccagcaccacccaggagatagcctccgttctgtctactcacacctgtgacattcgggtggcccaggatgta

SEQ ID NO: 21 - protein, 1004 aa, Mus musculus
MEASEPTHPTPSATDQPASVPGIPGGLGGQDRLTLGPVILPPEQGLAPTVFLKALPVPLYHTVPPGGLQPRAPLVTGSLEGASVPFILSPLLQPEGPSATQVGKPATPALTVNIVGTLPVLSSGVGSALVSTGRVKNTGKYLCPHCGRDCLKPSVLEKHIRSHTGERPFPCPTCGIAFKTQSNLYKHRRTQTHLNNSRLSLESEGSGSSLLEEGDRPGETASVDSRGDEGAPERALSPGALPAAQNRERKVESAPSLGATLSHREASADHTQMVSPEFSLDQPRRKLPEPKPCFLQRQQETCSEKPWDPKALEGQLRKCESTDSGYLSRSDSVEQPPVASSPLHSLSEHSAESEGEGGPGCSSSGNRAERGTPGPSLELEKKKLEERIAQLISHNQAVVDDPQLDHVRPRKTVLSKQGSIDLPMPYTYKDSFHFDIRALEPSRRRAALSPARSTFTPLEKARPLFFHSVPTQLSTTVECVPVTRSNSLPFVEGSKLWPEQRDPQDAVPGMQKALSPRPTPARLGCRPGLTLASISSGHPRALVRQAAVEDLPCTPTGDPSAAAEELDGKRAVAKEGVVYKGRASKKCSQRKQRMFSQEKWQVYGNETFKRIYQKMKTNHQGGQKHRQGGGGEDTGLSQDSRIPILGDTTAGCKLESWGSRPSLEDSLEAESPKQLKVVTRVKSSPTLGSTDSLCLSGKSSLLSPSGKLDLGCQPPPVPTACQAGDLEAPETDDSSGEAIKETSPGAQTVLRRSSDGSVQLAEDKLPSKRLKVEGLDHQEQPGPLEADTSGGSVQADPPPSQDSDSEELLGCSNKSTLHVTTAPEPSDVSSADVQWPGIGDKDSPLPSVPRTPGLHSLLPAQPQDPGVPNARSGGFFPPKYLLRLPQGENPSPIVAAGPEKGSDSLCTSTQPVEQALLVGSELGMLRPPGAYSGPGEAGGSPDDPSWSRLRDGKEEAQTGREKRDRTKDNILVVGHSPVPITSTTQEIASVLSTHTCDIRVAQDV

SEQ ID NO: 22 - DNA, 24990 bp, Homo sapiens
agccttgtcagcatgtgttgtttcctgactttttaataattgccattctaactggcacgagatggtatctcattgtggttttgatttgcatttctctaatgaccagtgatgatgatctttttttcatatgtttgttggccgcataaattgttttcttttgagaagtatctgttcatatccttcgcccactttttgatggggttgttttcctcttgtaaatttgtctaagttccttgtagattctagatattagacctttgtcagatgagtagcttgcaaaaattttctcccattctgtaggttgcctgttcaccctgatgatagcttctgttgttgtgcagaagctctttagtttgattagatcccatttgtcaattttggcttttgttgcaattgcttttggtgttttagtcataaagtctttgcccatgcctgtgtcctgaatggtattgcctaggttttcttctagggtttttatggttttgggttttacatttaagtctttaatccatcttaatttttgtataatgtgtaaggaaggggtccagtttctgctttttgcatatggctagccagttttcccagcaccatttaataaatagggaatcctttccccattgcttatttttgtcaggtttgtcgaagatcagatggttgtagatgtgtggtgttatttctgaggtctctgttctgttcccttggtctatatatctgttttggtaccagtaccatgctgttttggttactgtagccttgtagtatagtttttctcattctgtgaagaaagtcactggtagcttgatgggaataacattgaatctataaattactttgggcagtatggccatcttcatgatattaatttttcctttccatgagcatggaatgtttttccatttgtttgtgtcctctcctatttccttgagcagtggtttgtagttctccttgaagaggtcctttatgccaatcttattctgcatgccagcccaggcttccctgttctctctgtctttcttcactggaaggaatatacttctcaactccttgatcttgggtgaatccctccatctctcagcgccttattcctcttgttagattaataacagcacctccctgctgcgtggattagatggcttagggcatgtgtagaccttgggcctgtggcctggacatggtgtcacataaaggtcagctccctgtgctgtgaacctgcaaagcttaggcagaagatgtctcaggcagatcaaggtaatactgatgggcttgggaaaaagaaaaagagaaaattagctgaataattttcagcagatttttcccattttgcattatgctgtgatcagtgcttataggtagcatctgtttaatcctcgttatccacattttacaaatgaaaatcctgaggttagggaacttgctgagcttcacagggagggggtaagtggcaaaaccagaactcaaacccaggcttttttcttcttccaccaagaagacaggggacggggatggctgagcgcagctggcaggccctccctcttgccaaagccaacctgacatcaagcttctccttccacacatctgcaaccgattgaccatctacagggaaaccacgtaatttgtgtatgaaaattaggcaattgcaggggacactcctctcctccaacttgcctaagctttctgcacactgtgtgtttgtttgtaaactctcttctggcctgctcctttatcataattgtttaggcaaaacatattttgtcactaaacagaatgaatttgggtgaagtcatagtgggaactaacatgtgtttggccctgacaggaagtgggcagcctcccctgcttttagggaggcgttgtttctaaccagctattctcaccctcagagacccttccagacccttctagaatctgacaaaagttagggctgctcttgctctctgggaacattcacctgcgcacataaggtaagttgtaatttccctttgggtcctggctggcctagatgcacattcaagtgggtgggcgactgagaggggtttcaatgtggggccatttaccaagtgtgggcctggttctgggaagttggggcacctgagggctggcagcagtgggggagtgttacccactccaggcatgagaggccaacgtgggaaccgtggttggacctagagagggccacctaacgaaagtctgtccctgagtagagggacaaaggccaccttggagccaggcctgaccttaccctcctgcctggacttgccagcacctccctttgggcaagcctagctgggtgctagtggactagggagcatgttgctgcagccttgcaggtacagggtctacaccaagggtgtatcaggtgaagactgtaagttaggcaggtgcttttcaaagtagaggaccataccactcaggtgtgcgagagcatgcatggtggcctacagatacatatttgaaaaattttaataggtatttatgttaatggttcgtagggaaaattgatcttctctttttggtgatgattgattcagtatccccaccgcccgcttttatgcccaattattacaagtatttatttcttttggccccctcgttcctgcagtaggcaaaacatgacatcatggtttataccttgcatttcttggctgatgaggataactatcttttcacatctcttttaaaaaactgttttgatttaaaacaattttcgaagttaatagacaatttttaagagtagttttaggtttgcagaaaaatgaggagaaagtacagagacctcccatccacctctttcagcctgtgtccccactgttttccctgttgtgagcatcttgcaaatgagggtggtgcattggttgcaactggtgaacccactgagagacaccaaagtccatagtctacactagggttctctcttggtattgcatgttccatgagttttgacaaatgtatagtggcaagtatttggtattacaggatcagaacaatccctttcactccacccacctcttcatcccctcctcccccaacccctggcaacccctgaccttttcactgtctccatagttttgccttttccagaaggtcatacagttggaaccacacaagacaaagtcttttcagattggcttctttcacttaggaacatgcatttaagtttcctctctgtctttctgtggcttgccagcttatttgctagcttatttctttttatcgatgaataatattccattgtctggatgtgtgtttactgatgtttactgaaggacatcttgctcacgtccaggtttttgcaattacaatgctgatgtttacatcagtgtgcaggtttttgtgtgaatgtcagttttcaactcactgggcaatgatatagttcctcttcctccctcccccctttttttttactttctgaaaattgcgatacaacatacataaaatataacactttcaccattgtgaagcatacagttcagtggcatgaagtgcattcacattgcatgcatcccttttaaagcaatggtgttctaggcatgaggctctacacaggtagggtggggactgagtaacagcgtaagtggtccccatacgtggcggagtgggtgatggtggtccaggatgaacggaagtttgggaaacttgtaactacaccagccatcttagtacccaagttctatctgctaaacgtatccaatatgcttctccatggccttctctttcggggccctaaatgtaaattctaaaaacctacttatggcattttcatgttctctctttgcccaggctcatttgtggtttgcttttgcaaaggagggcttgggaaattgtcacttcttctcttcaagtttctcccacctctttgttcccctctcctccataaagctgcacatttgcgccaaaagatataactgtttgtgggggggaattgggaggaggtggggagctgcacacgcggcagatgagggatgcgccaagttccctgcgtgtgggagcctggggatggcaacagggtgagggcttggcattcagtccaggtgaccaaggggctgtcccggacccttccctcgctcaaagaggtaagccttctagcgagctgctttcccagccccggcccccagcttccccatcagtccaatggggacaataggacttgccatctccttgattcagagtgagcaaaattatctgcagctttttgaggttttcctgagaaaagcgtcatctccctcgaggaaggtgttagtcagctgtcatcttgccagcagggatcagctgttactcaaaggcgtcaatttcgcagtgatcacagaacaggctgcagagagcacaaaatgatcatcgtggcaggtgtgtcggaaacatagcgctcttttcctggcatttctactttgaagccccaagcctcccaccctatgagagtcagttctgggctccttttcctcctccccctacccccaggttgggctaaagtttttggggggcacatgatactcagccctcagctccccaggcaggcccccactgagacacccctcgggtgacaaccccctcaatttggccccattttcccagtcacttcagggcctttctgggtgctctgaaattcgtcctgcagcgagagctctgcgtgtgcctcgtcctcctgcctggacgcacactccgggctgttgatgctctgtgtcctggcacccctctttccagactgccctggggaatggagcaggaattgccactgaggcaggagctggacggacttatttctcccttcctcccttccgtgacctccccacccatgaccattataaccgggggatcaggacaggaggcttgtactcatccagtttccttagggtttggggcttttggaattaaaacgcctttactgagtttctgccacaggaagacagaagccctgctcacctattctccgactcagcatttaagagccaactgcaggcagtgcttctgtgtctgatggctccctgtggccacagagcctaccccgtgcattcatgcgtgcagctggaaatgccaggacatggctgctcccacaggcagtcccgatgcaggcagctcacttgcccctggggtgcatgttctacatgatctcctggtgtcccccagtgggattaagctccagtcacccacagtggggacttgctggacattttgtagcctccttcacccccagccttcccatttccttacaagtgtttcctgggatcacctcccaaataaaatacttgggaatggaatccttttctcaggaacccaccccgagacagcatcccttgctagaggcgatgcatggagactgctgagctgacggatgggggaagagacaagggtaggaggaagacagggtgggggaggaaccggtagttaatagttcaaaatattatggcgtataattgaaaactgaaataaatggagcgcttactctgtgctgggcacagcacttggtgttttcacataacttatttcatctgaacctcctggtggctctgccccaatgccactgttcttagagatgaggaaacagtctcagggccaccctctagcaagatggttaagcagagacagaaattcaggcctactggtctcctggggaggttcctgaaattctcagctagtagaaaggttgcagcgtcttgaggtaagcctttatcttccattcctattagctcttatccgttctggcagctacctgttaatctctaaagattcctgcctttacatctttccttaaacaattagaacgtctcagattgttttgaagccaggggctcttgcagatggcctagtgtggtgaggttcataatgagaccagaggtttaggagagggacagagagtgggtgcaatggtcttctgggtcctcccttctgctcagtgatgtgctggtaaatgttgagactggctttcaggatgaaaaaaaaaaaaaaggactgacttgtagcatttgctgatttttgtggtgtcagtgcttccactgtggccagttcaagctgtgaacatgatgctactgatgctgaggttgggaagagccagaggtgtgacgttccacactgccaggaagcgttcccaccacaccagcacatcccacataaatggccccaagatccctgagaatggaagatgccatagaatccttagcagtggtgagctctgagtatgtaggagctggtgtgaactggatgtttcttccccccagctccaaatctacatgtaaaatcctcactccccatgtgatggtattaggaggtgggtcctttgggaggtggtcaggtcatgacgtggagccctcatgagtggaatgagtgccttataaaggggaccccagagagctccactggtctttccgtgatgtgagggggcagcaagaagacggccatctaggtaccaggatgcaggccctcaccaggcactgaacctgtcttggacttaaacttgatcttgaacttcccgtctccagagctgtgtgaaataaatatttgtcatttaagccacccaatctagggtatttttgttatagcagcccaaagtacttttaaaaaattgagtacctttgctcaatgaagacaatactttaaaaaaaaaattgagacagtacctgtttacaattgaggtaaaattcacataacattaaattcaccattttaactatttgaaagtgaacaattctatggcacttagtacattcatagttttacaaactaccacctctgtctggttccagaacattttcatcaccccagaaggaaacgttgtacccagttaaagcctcattccccattctccccctcctctggcaaccactataatttgttttctgtttccgtgagtttgtctattccagtttcttcatacaaatgcaattataaaacacgtgatattttgtgtctggcttctttcatgcagcatgacgttttcaaggtgcatccatgttgtagcatgtgcaagcactttgttgctttttatggctgattacgattctacggtactgtatattgccgtttgtctatccactcatcagctgatggacatttctgtcatttctctcttttgactattttgaataaagctactgtgaacatgcacgtacaaatttttgtttgaatacctgttttcaattctttggggtatatacctagacgtagaattgctggatcctatggtaatacatgtttaactttttgaggaactacccagttgtttttaaagtggctgcatcattttatatccccaccagtcgtgtttatgggttctaaattctccacatcctcaccaacacttgttattttattgcttattagtttattattattatttaccatagccatggttggtgtgaagtcctatctcattgtggttttgatttacattttcctaatagctgatgggatgaagcatctttttatgtgctttttgggcatttggagaaaaaaaatctattcaagtcctctgctcatttttaaattgggttgttacaaaaattatctgggtgtggtggtgcacgcctgtagtcccagctactcaggcggctgaggcatgagaatcgcttgaacacgggaggcggaggttgcagtgagctgagatcatgccactgcattccagcctgggcgacagagtgagactccatctcaataaataaataaataaataaataaataaattgggttgtcttttgttattgcattgtaagagttctttgtatattctggatatatcatgcatataatttgcaaatattttctcccattccgtggactgttttttcactttcttgaaagtatcctttgatgaaccaaagttttagattttgaagtcaaatttatttttcttttgctgcatgtacttttggtgtcatattttaaaatccattgcagccgggtgtggtggctcatgcctataatcccagcactttgggaggctgaggccagtggatcacccgaagtcaggagttcgagaccagcctggtcaacatggtgaaacctggtctctactaaaaatacaaaaattagctgggcatggtggcgcacacctgtaatcccagctactcaggaggccgaggcaagagaatagcttgaatccaggaggcagaggttgcagtgagctgagatcgcaccactgcactccagcctgggcaacacagcaggacgccatctcaaaaaaaaaataaaaaaataaaaaaataaaaaaatccattgctaaatccaaaaaagtcatgaggttttaatcctttgtcttctaagagttttataactttagtgcttacatttgagactgtaatcaattttaagttatccagttgtcatttatttgtttttaacattatttgattgtaagtttatgtaacgtatcttttaattagggctgtgtttcacagctggcttgcgcaatttttgaaaatttaacaatcagctctcttgagccagtatgagtggtatgagccagctcaatgtgctgctacttctatgttttttattatttttaaatttttatttatatattttttgagacagagtttcactttctcacccaggctggagtgcagtggtgcgatattggctcactggaacctccacctccaggattctagcaattctcctgccgtatcctcctgagtagctgggattacaggctcctgccaccatgcccggctaattttgtatttttagtagagacggggtttcaccgtgttggacaggctggtcttgaactcctgacctcaggtgatccgcccgcctcggcctcccaaagtgctgggattacaggcgtgagccaccatgtccagctgtgctactacttccgccacaccctgcttagaaccccttactgctaacggctggaatgtggttgttttcttggggaacggagctggggatgggtgaaatgtgcttatggagctccttggtgatgggtatctgtggaaaaaggatctggggacccctgattctctagtcacaggcctgtccagaatttccttcttgcatctggcttttcctttgtgatgtgaagagcatagctggacctctcttgctccctcccctaggatttgccaagctactcctcctggcttagagggaaccagttttgtcctaactcagtctggaggggctttggaagccccacctttgagcagagacctaagtcttgtcttgaggctgaggaagtgctccttttcctagtggtgtcaccagatcaaatacaggatgcccagccacattggaatttcagataagcagcgctcagtgtttccgtataagcatggcacgtgtgagatttgggacatacttataccaaaagtaattctcatgcaatatttgggacatactcccactaaagaactatgcattgtttatcaaatttaactgggagtcttggatttttgtttgataaatctggcaagcctttccttgcgtcagttttttttcttgctgtcttcatcctgcagcagagactcagaacctcagagtgggaaggccctgattccttgcccattttgcagatctggaaacagtcccagagaagaaaagggatttgtgcaagtgcacggaatcactgtgaacttcgaggaccttgaacaagctgcatgactttttcatgaagtcagcacactttctgagtgtctctgcatgtggcactgtgctggtgccaggggatgatggtggcaaacctgccatggacctgtgcagatggcatgttaaataagagacaggattcagacagatctgggtccaaatcccgctttgccacatgtcagcttgcatgacaagttacttcgctgtctgagcctcagctttcccttttggatgagagtaccttcctctcgcttgggatgagagtacattccttaggggattgtcaggcttccgttgggtgatgaagtgcttggtgcagggtaggcaagatttactgcatgaggagagaggagaggtgcccatggtaaagtttggttgttgtctgcaggttttccagcattgtgggccatccagatgatgcggaatggaggttccagaacccacctgccctgcccctcctgcgagggaccagccagctcccactcctggccctccaggggccccaggtggccaggcctcacctcacctgaccctgggccctgtccttctgccgccagagcagggcctggccccccccactgtgttcctgaaggccctgcccatcccactgtaccacacggtgcctcccgggggcctccagccccgcgccccgctagtgacgggcagcctagatgggggcaacgtgcccttcatactcagccctgtgctgcagcctgaagggcctggccccacccaggtggggaagccggcggcccctacgctgacggtgaacatcgtgggcactctgcctgtcctgtcgccgggcctgggccccacgctgggcagcccaggcaaggtgcggaatgcgggcaagtacctgtgtccgcactgtggtcgcgactgcctgaagcccagtgttctagagaagcacatccggtcccacacgggtgagaggcccttcccgtgtgccacctgcggcatcgcctttaagacccagagcaatctctacaagcacaggcggacgcagacgcacctcaacaactcccggctgtcctcagagtccgagggcgccgggggcggcctcctggaggaaggggacaaggccggagagccccccagaccagagggcaggggcgagagcaggtgccaggggatgcacgaaggcgcctcggagagacccctttctccgggtgcccacgtgcccctacttgccaagaacctggatgtgaggaccgaagctgctccctgtccagggtccgcatttgccgacagagaggctccttgggactctgcccccatggcgtcacctgggctcccagcggccagcacacaaccctggcgtaagttgccagagcagaagtcgccgaccgccgggaagccgtgcgccctgcagcggcagcaggcgacggcagcggagaagccctgggatgccaaggcccccgagggccggctgcggaagtgtgagagcaccgactcggggtacctgtcgcgctccgacagcgcggagcagccgcatgcgccctgcagccccctgcacagcctttcggagcacagcgccgagtccgagggggagggcggcccgggcccggggccaggggtcgcaggggccgagcccggggcgcgagaagccggcctggagctggagaagaagcggctggaggagcgcatcgcccagctcatctcccacaaccaggcggtggtggacgatgcccagctggacaacgtgcggccccggaagaccgggctgtccaaacagggcagcatcgacctgcccacgccctacacctacaaggactccttccactttgacatccgcgcgctggagccaggccgtaggagggccccgggccccgtgcgctccacctggacgcccccagacaagtctcggcccctcttcttccactccgtccccactcagctctccaccaccgtggaatgtgtccccgtcaccaggagcaactcgctgcccttcgtcgagggctccaggacgtggctggagcccagggagccccgggacccctggtccaggacgcagaagcctctgagccccaggcccggcccagcccgcctgggctgccgctcgggactaagctcgactgacgttcccagtgggcatccccgggccctggtcagacaggccgcggtggaggacctgccaggcacccccattggcgatgccctggtgcccgcagaggacacagacgcaaagagaactgctgcgcgggaggccatggccggcaagggcagagcgggcggcaggaagtgcggccagagaaggctgaagatgttctcccaggagaagtggcaggtgtacggggatgagacgttcaaaaggatctaccagaaaatgaaagccagtccccatggaggcaagaaagccagggaggtgggaatgggcagtggggcagaactgggctttcctctgcagaaagaggcagcagggagctcaggcacagtccccacccaagacaggaggacccctgtccatgaggacatatccgcaggggcaacgccagagccttggggaaatccaccagccctggaggcctccttggtgactgaacccactaagcatggggagacggtggccaggagaggagacagtgaccgacccagggtggaagaggctgtgtcatcccctgcactgggtggcagagacagtccctgttcaggcagtaggagccccctggtctctccaaatgggaggctggaactggggtggcagatgcccccagcacctggccccctcaaagggggtgatgtagaggctcccaggccagtttggccggaccccaagctggaaggaggtgcccgaggtgtgggggatgttcaggagacctgcctgtgggcccagactgtcctgagatggcccagcaggggctcaggggaggacaagctcccctcagagaggaagaagctgaaagtggaggacctgcacagctggaagcaaccagagcctgtgagcgcagagaccccaggtgggcccacgcagcctgcctctttgtcatcccagaagcaggatgccgatcccggggaggtgccagggggctcaaaggagagtgccaggcaggtgggcgagcctctggagtcctctggagcctccttggctgctgcttctgttgccctgaagagggtggggccaagggacaaggctaccccactgcatcctgcagccccagcccccgcagagcacccctcgctggccaccccacctcaggctcctagagtgctctctgccctggcagataatgccttttcccccaagtacctcctcaggttacctcaggcagagacccccttaccactgcccattccctggggaccaaggcacagccaggactctctctgcagcagtgggtggcctgaagaacgggcatcatttgttgggtcaggactggggacccctctttctcccagcccagcctcaggcccctccccaggtgaggcggacagcatcctggaggaccccagctgttccaggccacaggatgggagaaaaggggcacagttggggggggacaagggggacaggatggccactagcaggccagcagccagggagttgcccatctcagcaccaggggctcccagggaggctacctcctccccgcccactccaacgtgtgaggcacacttagttcaggacatggagggtgacagccaccgtatccatcgcctctgcatgggcagcactttggcaagggccaggctctctggggatgtcctgaatccctgggtacccaactgggagctgggggagcctcctgggaatgccccagaagatccttcttcagggcccctggtgggccccgacccgtgttcccccctccagcctggctccttcctcactgccctcactcggcctcagggtgtgcccccaggctggccagagctggccttgtcttcccactcagggacgtcccggagccacagcacccgcagtccccacagcacccaaaacccctttccctcactgaaggctgagccgcggctcacgtggtgttgcctgagccgcagtgtccctctgcccgcggagcagaaggcaaaggcggcatctgtgtacttggcggtgcactttcctggtagcagcctccgagatgagggtcccaatggccctcctgggagcaatggaggatggacctggacaagccctggagaaggagggccggcgcagatgtccaaggtaaagctgggctttgccccagggcccggggttgagagagcatgttgttatcccgtaagacctctcatgagggaaggaagtctgaagccgtcccatgtagcatctgctgttcactgcttgcttgttcctgagggaggctggggataccacatagacagcaggaaggaataaaggcccaaatgcaaaccaaaacagagttgcggaaaacataaattccaaaggaaagaattactgtactcaagacatgaggtgagatagtcttcataaccaaatgtaaaatttaactgagcttcctggtaacagaagcaaaaagtaaaatgaaacactccatcagagaggtgagctctctggatcattctaagattataagccagagactcccaataattgagagagtctttatactggggattctggagaaggaattactgttgattggactcagccctctctctgaggttcctgggggcagagagaaaagggggaaatgtggtggatgctcacaggtgttctcacttggtgaagaaatgataatgcagagctccaccttgagagggggttcacgcacctggttgtgatgactgagggcttagtcctgctctggagtggcttgggccgcggccactgaggacggtcctggaggctcagcagtcatttaacctttgtggacagtgacaaaggcccggagaccagagtcttgcaggctgttcggctttccctaggtggaacccaaagttgtggggagtgctgttttcatcttgagagtagcgggttagtcagtagggccccaggggtgtgggggctcccggggaggtggatttaggggatagtaaaggggctggtcaccgtgtttctttggcctccagttaacaccgatggcataggctttcctctgcggatcaagcccaggcggggtttcaggaggttctgtccaggaacgctctgccgttgcctggttgaacttctcaggggctcagcccgtttagcaatgcagtatttccgttttgatttctgaagacaggcatcttgtctgcagagcgagaaccctttggagttttcttcatcatgaggactttgagtaatgtgatgccaacatgcttggtgttttcagttctcctacccaacagtcccaggggtgatgccccagcaccaggtgtctgagccagaatggaagaaaggcctgccttggagggcaaagatgtctcgtgggaacagcaagcagagaaaactgaagatcaaccctaaaaggtaggatgagtggccacctctgtcatttccacaaaaccccaagaagaatttactatgggatttgaaaggtatccgtgtgctccagagaaagagttcctgtttcctagggtttagagcttcatgattaaaggactgaatttgtttcccaccccttgcaactcaccgcctgtgtattttttgatggcacctttctaaggccaggaatccagcaaatctttgaaataactgggttgaaaacacatccattcaacttaagtctggaagagagagagcctgttaattatttacagcttttattgtgtttttaattatgcaagcaatgaatgtcctttgcagaaaaatttgacaatacagatgagcaaagagaagacaataaaacatcctagtaatctcgccacgcagagataatcaccgtgaacattcaggagtgtgcccttctagacttttctttgcggtatgtgtttgcacatatccacccccaacaaacaggaggccctgtggattttcctgccactctttcattgtgcctttcttggattgtctttctcctttgcttaaaacccttcaggctgcccgttgcatacaagttgaaaagcgaattctctaacccctgccctctttctaccctcattttccctgtgatctcctcctctcctgctcgccctccaccctcatcccattctctaatccacattctaatcccagatccctgaagcatttatactccacacctcagttgtcaacctgtcaacattctcccccagactgtcagtccttttttttcttttttgagactgagtctgactctgttgcccaggctggagtgcagtggcgtgatctcggctcactgtaacctctgccttgggggttcaagcgatttgcctgctcagcctcctgagtagctgggattacaggcatgggccaccacgcccagctattttttttttttttttgtatttttagtagagacggggttttgccatgttgcccaggctggtctcaaactcctggcctcaagcgatcctctcgtcttggcctcccaaagtgctgggattataggcggtgagccactgcactgtcagtaatttatccaaagcctggatattcttcaaggggcgatccaaattcctaactttcccctgtagctgctcagaccctcagtggctagagatggcctcttctcttttggttccccctcctgccctgcctctatcaatggtctgccgggaccatgtgtccagagctaacattatggggcacttgctgtgtgccagactttccctaatcgctttctggcatgcattgtttcaggagatcccacaaggtactgcccatgatgtggatggtattattagccccatttttctcatgaggaaatggagacacagagagcttagataacctacccaaggacccagatttgaaccagccggtctccttccatagcctgtgtgccagctagtcgcttgtcttggtgcaccccagcctgtcctgggcacgctagcggcctggcattttctagatttttcttgcaatgcttgagattttgcatttctgacacagccaggtgatggtgctggcgtggcccccagagcaggcttgggggagtggggctttcctttccagcgtccctcctttctcatggatcactcagggtcctgagacagaagcctgactcaaggtagtctgaacaaaacaaggcctccctgcctgtgtaatggggcctctaagcctcatcatcagccctggcccaaacttggtggtgtgggaaggacagtcttccaaaggaaaattcgagtgctgctcttggaggaaaggggaatgcatgccatccagacggaggagctgcatgcggggctctgggaaacaagggacatcggctagtggttgtggtcctcctcagtatctcaccaataaggaggaagtgctcagttacatgtgactgatagttgatgagcctgaagcctccaggcatcattggaaagatgtggggagagggaagaggatgggttgcctcattaacagctcccactttcccaagacttcagcttgactaattcgaaaatatttaccatgtacctgctgtgtgcctggtgcccacacctggaggtggccgaggaaactttcttaatccagggtgagggtcccagactggagcccaggaggcttggagatatcactccaggacaccttgcaaacccactagcagctcttgggccaaacacagtgcatgtaagacccttattaggccagtgctctaaaacttttggcacttagcagccacataattagatgtaaagatttctcataaaaatctggatttctaacttttcttgaaatatgggaagctctgaagacactgggcctgcctccttacatggcaacagccagatggagatgagcagtggccaccccttgtgggtaagagctgtgttccctgctgcgctctctagctcacctctccctaatgtcttaccctcggccagcctctctcagttatgctctctgcctggcccccatagcatttgagtttgcaaattttggccttactagctggccttgtggaactagacggcctctccactcaacaaatcacgacaagagcccatggatgggcacaggaaggggcaggggcattgcagaacagggaggagtctgaacaaggacttagagctctaaccaagagctcctggctgggtcaaatgaggaggaagctgttgagctttttatatgcacaaacgtttattggttgatagtgatttgtttatcattggtccttttgttggctcatgactgtcttttgagttaattccagcttcaaggcctttgcacctgctagtccctctacctccatctgcacactcctcctcttgctcctcacatggctggctcccctgtctcagaaaaagcatcagcaccatgagggcatggatatctaggcatggacgtctttgaggggaggtattactctgcctaccacactgtttatccaaccacccacacacatatgtttgtagatatttatctgtccatctgcccacccacccacccacccatcaacttacatatctatctatctatctatctatctatctatctatctatctatctatctatcacgtaactccttgtgttctctcctcaagaaggaagcctacttcttgattcattttcccactttaatttcagttgtcttaatgttctacagaaaatgaaatactgtagcagagattgctctatagtccttagctcacagagaatgatacagttctcttctaagtaaaatattaccttaaatgttatataacaatatatagaaaagaaaaatttaaaagattattatgttgttttatgtatttggcacaaatcatatcaatctgtgttttcatactttgcaaatcaccaataatatataatattgtttggtgtctttaaagtacacataaaagtatcatagttatttatcatttatcattcttcagcttgatttttaaggtcaacattgtgtttttgaagatctcatcgtgtcaggacatactgatcaaattcattcattctgattgctgtagagtgtctcatccatgagtaagagtttgcccttcattcatatgcttcctaatatttgttgttatcagattttttaagtgatgaatataatttataggattctatatatatcctagatttgtatgtattatttgcctgttatatatactgcaaatatgtttccaagtctattacttgtctttttaagcccctttatttatatgtacccacataattgcccatctcttgtcttttcatttgtttctgcatgtcagatcttccttctgggattattttcttctacctaaatcatattctttagaatttcctttattagagaaggaaattctcttagtttttattactctgcaaatatatttatttcatcattgttgttgaaaaatagtttgctgggtacacaattctaggttgactgttattttctcagcacatcaaagctaccattgcactatctgtcagcttccattttgtggtaaagaaagccagctgttagactactcatctgtcttttgaaagtcttttatctctggctacctttaagatcttcttttatcctttggtgttccatagttttactttgatgtatatagatgtatgttgctttttatttgttccattaggaatccacagggctattttgatttgtggattggtgtctctctgtaaaaaattcttagccatcattctccaaatattgcctctgtcctgttccctctccttcctttctgaaatactgaaataatatatattagtccttttctatctttcatgtcttttaatacttttaataaccttgtttctctgtgctataatctggatactttgttcaaatctgtctttaaaattttaccagtttttaaatctactattttttgtaaagctttattaaagtataattaaattttaataaattgcacatatttaaaacatacaattaaataaattttgacatatatatatacctgtgaaacaatataaccaggatcatgaacatatctgtcaagcccaaaagtttcctcctatccttttgtaattcctcccttctgcccgtcctgaagtccttccatccccaggtaaccgctgatgtgctttctgtcacataggatagtttgccttttctagaattttatagaaacagaatcatacaatatatgctctcttttttttgcctggctttattcactcagtattactattttgaggttcatccatgttgtgtttatcaagaacacattccttcttattgctaactagtatgccattgagtgagtatgtcacaatttgtatacatgttcacttgttgatagacatttggtttgtttcagtttggggctattacaaataaaatgactataaatattcatatgcaaacctttgtatggacatatgctttaaattatcttgggaaaatacctagaggtgaaaagcctggatcatatggtagatgtattattaacttttaaagaagctgccaaattgttttccaaagtggttgtattattttacatctccactatcagagtatgagagttccatttctctacattattgccaacacttggtatggtaattttttttagttttagtcatttgaatagttatgtagtggtatctctttatagcttgaatttgcatttccctaacaagtgatgatattcagcatctttttttgtgtgcttatttagcatttgtatatcttctctggcgaagtgtctcttcaaatcttttgcgcatcaaaaatgggttgttttcttattgagttttgagaatttttttaatatactctgattataagttccttatcggagatgtgatttgtaactattttctttcaatctatggcttatctttctattcttttagtagcatcttttaaaaagcaactgtctttcactttgatgatatttaatttacctttttttgttatgtttttagtgtcatagtttaaaaaagtgtgtctaaacagagcttcaaagcttttcttctaaatttttctctaaagttttatacttttaagttttatatttaggtctataattcattttcacttagtgtttacatatggtgtgatgtatggatcgaagttcttatttttgtgtgtggatatcttatctagttgttccagcatcatttgttgatctatttgtctatttcaatgcaaataccacactgacttgattacgccgcttgactctgagacttattataaagctaaagtattccaaagagtgtggtttttgcatcaaaatggatacaaagatcaatggagcaaaatagagaatacagaaatagaccatgctgtggtcaattgatttttcatacaggctcaaaggaaattcagcggaaaaagtatagtcttttcaacaaatggttccagacctggaaaatttctccatcaataagttgaggtgtcatcaggcttacctcatctgtttctcttctttcatggatcactgcctttattgctcaatgtccaatgccctgaacactattgttttgtatctttattcagttttttacttgggatggtaaatctggttacttttgcaaagtcttggtcagaagtccctggcctattgcagtgcctcctagttgatctcccctacttttattggtctgctaaagtttaagttcaattgttgatgtgaattatattttatttccaaaaagttttatttaattatttttttaatttgcttgatcattttatagtctcttgcacttgactcttattttcaacctttttttttttttttaaaaaaaaaaacacatctaatgttttgcatctgacaatgacaacctatgaagtcttggcacatctgactctgttttatatatttgctctcacatatgttaacttatttccttgtttgtgttaaaatttttgactgtgagttgatatttttggaactttgagatgtgggttgaaggtggattcctccaataaatatttgttttgcttccactgggtgcctgggggtgctcgtttgtttgttgttatgttccccgggcaggtggtggggtagggagtatttatttctaattcacccacatactgagagtatgcctttcagaggtctcagctttatgcaggaaaggaggttgggtcttccatgtgcctctcactgaagaacattctgggctttgagtcctgtaccctcagctgcaccagagcatgaaaataggaaggtcatcctcatctggtttggcagattcctcaaagtgaaagcaatctcacttttccagggcgcagctctcacttggtttttgcctttgaactatttcttatcttttaatcagaacatacgtaaatttaaatataagtttaaaaaatgtttacattttacgctgcatttttaattgttttcagtataaggataaatttggtggtaatcagtcagagtattgagtccactgtgctgttggaaatggagttcttattttttaaccttgataatgatggttttttcattaagaatttgtaaattttgatgtagtcaaatggggctgtcttttcatgactttttggtatatctaagaaatctttctttactctcaatttcctactttcaaaaatatgcagatatgttatcttatgttttcttcttgtatgaattcatatatatagaaggatttatttttatttttgtttataaagacaactatggaccacgggttaaatatggtttttaacttattttaaccatgagcaacgcattatttatatacatatatatttgatcgacagggtctcactatgttgcccaggctgcagggcagtggctattcacaggtgtgatcatagcacaccacagcctcacactcctggcctcagtggtcttcctgcctcagcttctggagtagctgggagtacaggcatgcaccaccatgcctggcttggtttttatatttttaaaagcttatccatataaaaacagaagaagaatacgtggcacagattgtctgtggcatacaaagtctaaaatatttattagctggacctttgcataaaaatcaagcagacccctgcattaatccacttttgcccacttacatgttaaattttagcttcccgtttatacttgaagtttttttcagggcctttcattctgctttcattcatctctatgttttttgccaactgcaaataccacactgtaatgaaaatggttgttttcattaacaaaactacatgagttaaagaagagagattagaaaatgcaggatccacttccagagtggaaatggaaaaacgcagaaaattcatactcagaagcctaattgccctgacattaactagaggcatagagatccggagcactcacaaaatacctccctgccttgcccaaagcaagcgcgggatcatggaattagattttattgattaatttataactgtgtactgtgctgtatgaagcatgaaacattcagagacttgttcctaggaagcttccaacaaatggaacaatgaattgtgaagccccaagtgaatggaaatgagcgaggagaagattgcaggttgtatgggagaagggcactctataaaaccctaaaatatacattagtcgttgaaggggagagtggagaagaaaaaaatcctgggctttgagaatgcaattctattagcagatagtgtttttccttatggagcggatgtttatctgtctaagccatgtgtctattcactttagtcatcacacaatttacttattcaatgagatagcactctcagtaatgagagcacaatctctgcagtgaggtaaagacaaagacctacagatgtggccctgagtccacgtggcctctgctgcatgtgacccccaccacatgtggctgagactctttgtcacgttggccacagccccagagctttgacagcagtcccaggtcctgcttagcaggatacagaggctctgccatccacacctccactgctcttctctttgctttgttcttctctgtggggtcaagagaggaaagtgagggaaatagcacgtcagatctcatagtttcgccccagaaaggaatgtgtgtggagtgggctgtgtacacctgcaagagccactccttgggtctactgtccttccctgagagagcctgacaaaggtggcaagggggtgacgagtgtatcaccctcacagccgggtgcggaggtgcagcctgacgaaagtgtcctggatggggccccaacagcactggccacaccttgaggggacttgcatggctggtgatggagatgagcttgcaaaaccttcctaagccaggatgctgcttctccaggaggggctgcacacagaacgttttgggagaaccaggagagagagaaacgtaccctgcccatgactaaactaaacagtcctttgaagacattgccaaggtccacttgggctgttctcgaaggcaaaaagtttgaaattccaccttgatgaagtgcgaattcagaggcggggcctttcctagctctctccttgttattttgcgtgaggagaaagacccccgcttgctaattttctgaaagtaaaacctccctgcagttcaaactgtgccgttcttaacacctgcaagtgtgtggcagccacccactgacttgcgcaaaggtgacccagcagcaggtggaagaagaattctctccatgtgccaccccttccttcctccctttgtctctgcactttgaaatctctctccacccaggccctgcaggatttggttcaggggtttgtcgctccccaccctggctcagatagctctttcaggaacctgtgttcttgacaactgcttcaaagaacaaaccagccaccactgcctcccccaccaaactaacctcccctccccccagccggggaatgacagctcctgccccagacaggggaggcaatcatgcccagttgaggggagcttctcccaaacacagaggccggaaaagatgaacaaaatgtcactttctcattgttgctgccaggaaaaaccagtgcccaagaggatactgcattctgtagatcttatttaaaattttgtgagcggccctggtgattaggggactgcggctggatcttggcggtggctcagataaatgagaaaggaaaatagccggttctgaggagcactgtggagtagaaatattgtaaactgaggcttgtaaagggaagggattacttgtggcttgaccaggcagttagaagcagtgcaaagatcttctaaaagagcttaaggcatattgcaggcctggctcttcgtctcattcttttgcctatataatgggggtgctatactaggttgatggcctgtttgtggttgcacattcctattagtaaaataatttgtagcctgcacctattaaatgtgtatttgttcatttacaaattatacatatattctgctctatgacatgaaacaatagaaacaagaaaggacatgaaacaatagaaataagaaagact

SEQ ID NO: 23 - DNA, 3857 bp, Homo sapiens
atggaggttccagaacccacctgccctgcccctcctgcgagggaccagccagctcccactcctggccctccaggggccccaggtggccaggcctcacctcacctgaccctgggccctgtccttctgccgccagagcagggcctggccccccccactgtgttcctgaaggccctgcccatcccactgtaccacacggtgcctcccgggggcctccagccccgcgccccgctagtgacgggcagcctagatgggggcaacgtgcccttcatactcagccctgtgctgcagcctgaagggcctggccccacccaggtggggaagccggcggcccctacgctgacggtgaacatcgtgggcactctgcctgtcctgtcgccgggcctgggccccacgctgggcagcccaggcaaggtgcggaatgcgggcaagtacctgtgtccgcactgtggtcgcgactgcctgaagcccagtgttctagagaagcacatccggtcccacacgggtgagaggcccttcccgtgtgccacctgcggcatcgcctttaagacccagagcaatctctacaagcacaggcggacgcagacgcacctcaacaactcccggctgtcctcagagtccgagggcgccgggggcggcctcctggaggaaggggacaaggccggagagccccccagaccagagggcaggggcgagagcaggtgccaggggatgcacgaaggcgcctcggagagacccctttctccgggtgcccacgtgcccctacttgccaagaacctggatgtgaggaccgaagctgctccctgtccagggtccgcatttgccgacagagaggctccttgggactctgcccccatggcgtcacctgggctcccagcggccagcacacaaccctggcgtaagttgccagagcagaagtcgccgaccgccgggaagccgtgcgccctgcagcggcagcaggcgacggcagcggagaagccctgggatgccaaggcccccgagggccggctgcggaagtgtgagagcaccgactcggggtacctgtcgcgctccgacagcgcggagcagccgcatgcgccctgcagccccctgcacagcctttcggagcacagcgccgagtccgagggggagggcggcccgggcccggggccaggggtcgcaggggccgagcccggggcgcgagaagccggcctggagctggagaagaagcggctggaggagcgcatcgcccagctcatctcccacaaccaggcggtggtggacgatgcccagctggacaacgtgcggccccggaagaccgggctgtccaaacagggcagcatcgacctgcccacgccctacacctacaaggactccttccactttgacatccgcgcgctggagccaggccgtaggagggccccgggccccgtgcgctccacctggacgcccccagacaagtctcggcccctcttcttccactccgtccccactcagctctccaccaccgtggaatgtgtccccgtcaccaggagcaactcgctgcccttcgtcgagggctccaggacgtggctggagcccagggagccccgggacccctggtccaggacgcagaagcctctgagccccaggcccggcccagcccgcctgggctgccgctcgggactaagctcgactgacgttcccagtgggcatccccgggccctggtcagacaggccgcggtggaggacctgccaggcacccccattggcgatgccctggtgcccgcagaggacacagacgcaaagagaactgctgcgcgggaggccatggccggcaagggcagagcgggcggcaggaagtgcggccagagaaggctgaagatgttctcccaggagaagtggcaggtgtacggggatgagacgttcaaaaggatctaccagaaaatgaaagccagtccccatggaggcaagaaagccagggaggtgggaatgggcagtggggcagaactgggctttcctctgcagaaagaggcagcagggagctcaggcacagtccccacccaagacaggaggacccctgtccatgaggacatatccgcaggggcaacgccagagccttggggaaatccaccagccctggaggcctccttggtgactgaacccactaagcatggggagacggtggccaggagaggagacagtgaccgacccagggtggaagaggctgtgtcatcccctgcactgggtggcagagacagtccctgttcaggcagtaggagccccctggtctctccaaatgggaggctggaactggggtggcagatgcccccagcacctggccccctcaaagggggtgatgtagaggctcccaggccagtttggccggaccccaagctggaaggaggtgcccgaggtgtgggggatgttcaggagacctgcctgtgggcccagactgtcctgagatggcccagcaggggctcaggggaggacaagctcccctcagagaggaagaagctgaaagtggaggacctgcacagctggaagcaaccagagcctgtgagcgcagagaccccaggtgggcccacgcagcctgcctctttgtcatcccagaagcaggatgccgatcccggggaggtgccagggggctcaaaggagagtgccaggcaggtgggcgagcctctggagtcctctggagcctccttggctgctgcttctgttgccctgaagagggtggggccaagggacaaggctaccccactgcatcctgcagccccagcccccgcagagcacccctcgctggccaccccacctcaggctcctagagtgctctctgccctggcagataatgccttttcccccaagtacctcctcaggttacctcaggcagagacccccttaccactgcccattccctggggaccaaggcacagccaggactctctctgcagcagtgggtggcctgaagaacgggcatcatttgttgggtcaggactggggacccctctttctcccagcccagcctcaggcccctccccaggtgaggcggacagcatcctggaggaccccagctgttccaggccacaggatgggagaaaaggggcacagttggggggggacaagggggacaggatggccactagcaggccagcagccagggagttgcccatctcagcaccaggggctcccagggaggctacctcctccccgcccactccaacgtgtgaggcacacttagttcaggacatggagggtgacagccaccgtatccatcgcctctgcatgggcagcactttggcaagggccaggctctctggggatgtcctgaatccctgggtacccaactgggagctgggggagcctcctgggaatgccccagaagatccttcttcagggcccctggtgggccccgacccgtgttcccccctccagcctggctccttcctcactgccctcactcggcctcagggtgtgcccccaggctggccagagctggccttgtcttcccactcagggacgtcccggagccacagcacccgcagtccccacagcacccaaaacccctttccctcactgaaggctgagccgcggctcacgtggtgttgcctgagccgcagtgtccctctgcccgcggagcagaaggcaaaggcggcatctgtgtacttggcggtgcactttcctggtagcagcctccgagatgagggtcccaatggccctcctgggagcaatggaggatggacctggacaagccctggagaaggagggccggcgcagatgtccaaggggtgatgccccagcaccaggtgtctgagccagaatggaagaaaggcctgccttggagggcaaagatgtctcgtgggaacagcaagcagagaaaactgaagatcaaccctaaaaggtag

SEQ ID NO: 24 - protein, 1227 aa, Homo sapiens
MEVPEPTCPAPPARDQPAPTPGPPGAPGGQDHLTLGPVLLPPEQGLAPPTVFLKALPIPLYHTVPPGGLQPRAPLVTGSLDGGNVPFILSPVLQPEGPGPTQVGKPAAPTLTVNIVGTLPVLSPGLGPTLGSPGKVRNAGKYLCPHCGRDCLKPSVLEKHIRSHTGERPFPCATCGIAFKTQSNLYKHRRTQTHLNNSRLSSESEGAGGGLLEEGDKAGEPPRPEGRGESRCQGMHEGASPLSPGAHVPLLAKNLDVRTEAAPCPGSAFADREAPWDSAPMDGLPAASTQPWRKLPEQKSPTAGKPCALQRQQATAAEKPWDAKAPEGRLRKCESTDSGYLSRSDSAEQPHAPCSPLHSLSEHSAESEGEGGPGPGPGVAGAEPGAREAGLELEKKRLEERIAQLISHNQAVVDDAQLDNVRPRKTGLSKQGSIDLPTPYTYKDSFHFDIRALEPGRRRAPGPVRSTWTPPDKSRPLFFHSVPTQLSTTVECVPVTRSNSLPFVEGSRTWLEPREPRDPWSRTQKPLSPRPGPARLGCRSGLSSTDVPSGHPRALVRQAAVEDLPGTPIGDALVPAEDTDAKRTAAREAMAGKGRAGGRKCGQRRLKMFSQEKWQVYGDETFKRIYQKMKDHGGKKAREVGMGSGAELGFPLQKEAAGSSGTVPTQDRRTPVHEDISAGATPEPWGNPPALEASLVTEPTKHGETVARRGDSDRPRVEEAVSSPALGGRDSPCSGSRSPLVSPNGRLELGWQMPPAPGPLKGGDVEAPRPVWPDPKLEGGRVGDVQETCLWAQTVLRWPSRGSGEDKLPSKKLKVEDLHSWKQPEPVSAETPGGPTQPASLSSQKQDADPGEVPGGSKESARQVGEPLESSGASLAAASVKRVGPRDKATPLHPAAPAPAEHPSLATPPQAPRVLSADNAFSPKYLLRLPQAETPLPLPIPWGPRHSQDSLCSSGWPEERASFVGSGLGTPLSPSPASGPSPGEADSIDPSCSRPQDGRKGAQLGGDKGDRMATSRPAARELPISAPGAPREATSSPPTPTCEAHLVQDMEGDSHRIHRLCMGSTLARARLSGDVLNPWVPNWELGEPPGNAPEDPSSGPLVGPDPCSPLQPGSFLTALWQGVPPGWPELALSSHSGTSRSHSTRSPHSTQNPFPSLKAEPRLTWCCLSRSVPLPAEQKAKAASVYLAVHFPGSSLRDEGPNGPPGSNGGWTWTSPGEGGPAQMSKG

SEQ ID NO: 25 - DNA, 44681 bp, Mus musculus
  misc_feature (1)...(44681): n = A,T,C or G
ctaaccagaatctcgtcatcctcaaattcaattatgcataatttattgagttcccgctgcgcgccaagtaacgtgagagcaggaacaagacagtacccgctctcggttcccgacattcttagatctcccgttaactgctctctcatagctgtttttgtctcactggctcgggctgcaaacttgtcaaaagtagtgaaaaaaagtatttctttatttcatagactccaccttctctagcactttctgggaagtttctaaacgcccttgatacggtaatgagatatttagttttcccgcgactcctttcccgttctgaaccgcccttacctggaatcactaaagggaaaagaaggcagcttcttggcagttcccgggagaaacgctccttcgagagtaggaggtgggagtctgtctgactcttcttgctcaggaaaataaacctcaaatttccagcaacagcgggctggcagttgttgctaggacgcgtccgttgctaagattaaaaaaaaaaagtctcctgttgagattgacagaacgccttcaccaataccttatccgctccccaacattgtctctcatagaaggctagtgattggttgttgtgttgtgacgtcacctaacgtaatcccagagaagcccagtttcccactagcaaggaaagcactagttctctgttcgatttaggtctctgttctttgcagtggcccctcttgacttaggtccatgccttgccttgcgtccacttcagccttagtcaaagggaagttctcgtggggtgcggatgggcagctcctaggccagccacctgacctcccttgtagggagcaggatgcatctagggacctgtgtaaaattggagcgtggagtggaggttgcattcaggttgccttggacgtccttgactactgcagcacattttttgttttgttttgttttttgtttttttgtcaaagaattttgtatagagtttgagtcaagccggaactacaagtctccgagggaaagctgcctggtggttgttggttattgtaaggatcctttcatccgactgtgggccctccgggattattagagtgaagctcatctcgccagctttctgtcttttctttaaaagtacaaattaaaactgctaatttgtgatctagcaaaatttagcaaagtaatgcagttgaccacaacaatatttaaagagttttgtttaagacaggatcttactgccgtagaactccctctgtaggatggatagatggatggatcgatgtcaccacagcttaactgagccaagattaacttagtgtctttatatatcttttcaaatttctctctcccattctgttttcttattctccttccccctctctgtgtgtggatctgtgtgtgtgtgtgtgtgtgtgtgtgtctttgtgtgtgttatgtaggcaagtgccaccatgtatatttggaggtcagaagaaaacctctggtattggtctttgccttacacttggctgttgtttttatgtgtagcaacactgggattacagatatgcactaccacacccagctttacatgggtcctggggattgcaacacagttcctaacacttgcaaggcgctaaggcatctcacagtcccgtctttcatatatctttcaggttcctcccctaggtggtagcatcccagtccttttgttggcaaaactagaagtctgagagccaccccagattcctgttgccctgcccagagccaacctattactgagttttaccattttcttccttgaatatgtcactggtaatgcatctataagctgccttctgccttttcctcatttctgatggactcgtctgtcccctagctagtaacaacagtgtctggtcatgctccaccttctctctaattctacgttaccatggagcgttctgaatcaggggttcaagtctgagatcactctttttgcacatgttagggttgtgcataaaaagttgtgcaaaaccttgagcacaacctgagagactgacagctggcaggtgccaggtacctttttcttcctcagtttcccacaacccctactcgctagatgagagaagacagaggccttgaagtcctctggtctgcacgtgagcacttggtctatgatccattctcacaaagggttattttttttttgagagtttgacttcttttccacaatatattcatgttgatgtcgatttttaaaatgtgaaaagtcactgttgactaagatagacataaacttaatgaaaatgaaacacaggcagccatgacaggctcatccattttctgcagccttaacatcctgactcaggagacagcatatccccagtggcccctgctggctccccaaggatgcctcttcctcttgaaaccaagatattgcttctttttctgcctcagtctgtgtacttttctccaccttcgttggaccttaagggcttcatctctccttgctcagcccaagtgccatcccttctgcaaagccacataaacaagcacacagcattactctcccttgcttttccatttgactatcccactgtgcctctaaagtcactttacagggcatctctgctctcggctttaaggctggggtaatacctcattagcttaaattgataccatccaacactgttcctgatacagtcacacacacacacactatatatattatatatatgtatgttaaacacataatagatacataaatacaaatatataatatattacatatcatagacagtgtacatatatatgcattatgtgtaaatatataattgcttaattgcttatttcggttaaaaaagcaagagaaattaacaaaggcttttttgtattcctcaaatgatatattttcctttgaaaaaatcccccacaatcctgttagatttcaggatgaccataatcttgtgacttggctgagacacagggtttgttgtcatctttcctttagacacaccccaagggatgagtcataagtcacaatgccaagaaagttaaaaaaaaaaaagaaagaaagaaaaaaagaaatgggaagttgagtgatttcttcatgctgcagattcatgattgacacctttggtggtagtggccagaggaccgggttaggatgactagtgagcacctgtgcactctcatggattaaatttgccttaaacttgaatgtattcaagcttagttttagttttgatagttaaggaacaaggtagtgagtcacagaataacaatgggaaataacagagaaatttcaaattgagtttacagcagaaaatctggtaagtcagagataagggtgattttttactaattttgttttttaaagagcttggggtggagggctgtgaatagacgactctgtaccattcttcccataggtttgcttaggagcgagggcaggggagaaggagaggaggggccttgtatgagctctgagatcacttctaggttcctgggaaactgtcttagcctgtgccagagggaacaggggaacgtcccccagtgaattcgcagcctcatttctcagcaatgaggaaatcagccagagaggcctgacttggtggcaaagctgtagctattaatgggaagagccaattctaatgtataaacacccacatgtgcgcagtttgtgtgtgaggcacatgtgtgtgtgcatgtatacacatacacgtgcgcatgcctgtgtgtatgcgtagagtcagagggcaatcttggatcgtgttcctcacaagccaatcatagaggcatctgagacagcctgaagctcactaaataaactacacaggctggctgtaatgctccaggaatccgctcatctctgcctccccaactctctctctctctctctctctctccctctctctctctctctctcttctctcacacacacacacacacacacacacacacacacacacacacacacacacacacacacacacacacacacacacacacacacacagaggcctgcttgcatgccacatgcctgaccttttttttttttaggtgtggtgattataacaagtaaaactaaaataaccaaaacggaggcattcttgctgcctttgcagagtagctgagcccaggggggactcagaatgacgatgccctgtctgcccctgagcgcgggatctatactgtatggatggcaggtgtctccagagaggacggctcgagagcccagaagcaaagagcagcttcgtctggaaatggagcgcactcacactctcggagacagctgagaggaagagagccacagcatgctggtgtgtgcaaagacctacggtgtttgcaggcattgagcagtggcgcaccatcaccagatcagcctatttttttttaacctttagggcatcttgaatgtttttaaagtaataatactacctctaaagaaagaaaattatgcttaagccaaaatttgttattgtctgaaccagtgccattgacaagctaaattttccagatctcagtgtgggggtgatggtgcttccctcagggaaaaccagaagaagacaggggtgggccttccttgcagatcacaggcaggcttctcagcccgccctggctcccacagagaactttctatgggagaaaggaaggggagaagagggagaatagactgattcttctctcccccaagtagacagcttcgaatttaaaatacaatccgtgttaaatagttttgtcatgggagggaacaagtcataaggtgcaaccaaaagatgattgctcatccccgaggctagccagtgttgctctcccacctttgagcagtttggtgtgctgtccccaaagttacctagtttggaaaattatctttttaattatttgaaatgtaaccaagaacatctatattagcaatagaaaccattcctcccctgaatctgttgattttcctgtttctttaataaaaaaaaatactcttacaaaatcagtttgtgagtgaaggtgtttaatctgggtcacagttggagggtacaccggggttggggagggatgcaggcagccaggttgttacgccttcattcaggaaggaaacagagaggatgctgctcctcggctcacgtctccctttttcctcagcccaggacccaggtccagagaatgatgccaccgacagccaggatggatcttcccatctcaattaacctaatctagttcatctctcaaggcatgcctagtggtgccttctaggtcttctagatctttccaggccattctagatcaggttgacaatatcaatcaccacatcccttattcctatatatcgtgaatgtgtttttatagtattaggaagaccagatgccaagttattagcctttctagacttctggtagaccttcatctgcctcttcttgcttgacacggccatgggaagctcagaacagcacccctctgtggcttttcacagtgaatgtgctgctcaatcataatcccaaattctgttcaaagtgagttctttgatgatgattaaatgaaaatctgaatgtcaaacctttgctagtcgttcctccaagataacaaacacttatccaaaatatgtcctttagatcagtgccatccgaggagatttgtctctagtccgtgaaatatttgttactcatgccacacaggaagtattgaaattgaaagtggtaaagatacatttatagaaatttgagagaaactatatttgaacaaagtcggggctcctttaccaaatgccggtatcctagctccttaggggagaggcgttctcattacctttgcagagtggctgagccctgtggggactcagaaggactcatgccctgtctgccccctgtgtgtgatctgtactatatggatagcagtttgtatcacagttagcataacccacttgtgaaggaaatgaaaacaagcccttaagcaacaggaggaggccacaatagcatctcaagcgcacactcaaactggacctcctgagtttgctgactgcttctcttcctgaggttctcagccccatcttcttgacgactcaggataagcttaagagttattgctcataatttacattatgagcatcctacagtggtctcaaactccaaatcttttagcttcccatttctcaggactgcaggtgtgtggtcccatggagaaggggcgggctcagtggccccgtccaactggggagctctggttccttgatggttgtggagggaaagtatgtttctttgtgtgcatggccactgtaggctgtctatgctccagtgcatggccccacacctatagatagcactaattaggctctgtgagttataaagataaaaaggaagagaacatgaaatggtaggggcagggtggggggttaaggaggaaatggagggatggatatgatgcaaatatattgtatacatagaatattgtcaaaaaataaataaaaatatacaaaacactgtatttcaatcacatataataatcactattttgcagtcattttgtaataataattaaaagaagggatcaatgggagataaattttcaatagttgtaaaataaacacaccagtagactgtgtagttgtagaagataaatatttatattttttacatccttgttctaaaagacatttcattgttgttgtctttgtttattgttttttttaagaaaacaaaaccaaacacgaacccaagaccatacaaagtcaagattgtcattttcttctactctacttgaaaaccttgtcctactagagggtttgcaagggtgatgcccttgcacagagctgctgtctcctgtggtattgatgctctctttgtaaacccttccaaaaggggtcctcccaagtctacgttacagttacctcttcttcacaaatataatacacttgaaaatacagcaatagcacaagaaatgctatcatttgtcactctcagatattctattagctgctttcctgttgctgtgaaaaagacaccatgaccgaggagacttgtagaagaatttactttttcttacggccccagagggctagattccataatggctgggtggaggcagcagttagacatggtagctgcggtaggcatgtagccgagaactcacgtctgaactgcgaatgtgaagcagaaggagcagactggaagtggttaaagctttaactcttaaagctccgccccccaaccccagccccccaccccccaccccggggcacactttcttcagcaaggctaaatcacaaatctcactagacagtgcttgctaccagctggggtccgagtgttcaaacacaggagcttctgtggacgttctcataagccgtgtattgttatgtgtactacccatgagtgtgatgatgtatcggtaacacagctaaggtgttcgtacctgggtcaatcattccaaagacgcatgcgtaagaactgtttctggtcctgctccagtgtctaggtgcagccttttgtatgttgtgcaactgttttgctcgtttgtattcggtttgacaaatgctctagttttttgttttttgttttttttttttttttggttttcgagacaaggtttctctgtagccctggctgtcctggaactcactctgtacaccaggctggcctcgaactcagaaatccgcctgcctctgcctcccaagtgctgggattaaaggcgtgcaccaccacgcccggcttctagttttgttcttatagaaattgtcctgttactcaaggttctttgcattaccgcgtgagttctaagaacggagtgttggaattcccactcagattggatcccacctataaatgaactgagccaaaaccgacatcataacgataccgaaccttaacaattcatgaacatggccgatttttccattccctttgattgtccaaggctgaacacccctaagcacataaaacatgagcgcttcccatgtgtcctgttaatcaatggccaccgtccctttcattagggagattaggcacgaaaggaggtggcgagcgggagagagtaatgattcttacaaataagttagtaagccacatagaagaatttgggccctcactggactgactctaaaacctgtttcttgttccctagtagacagctcagttgcactagggctcagggaaagccatcacttatttctgcaaacctctctgaaactcagattgcttctgaacaattgtacattttgaatacttgctacaaggataacttcagctgtagtaagaagacagtgttaatctgtgcagggacagaggggcatcagaggttaaattattcttccaaattgcactcgagaatacagtgtgctaattatatcctctgagtatctagcttgtctatacatcacacttgggattcaggctaatgaacagaataaactttttgcacaccattgcaaaacaaatctaaaaaaaaaaaaaaaccactgcacacataaaaagacacagaagaggacagttctatttataaattgcctgtgcgaactgatctaggagttgaaaaaaaaagtttgcaaaatggtctgtctgctctggatatagtttgtagactactccattagaaaattctacttattttacaataaaaaactatttatggtttttaggggaaagcttgcccactaccacaaattctgcactttcccacatttgagaaagtcacaagggtcagaatatctgaaatgcagtggatagacctcaccctgggaaaactaccatcttgattatgaatgctatcttcccttccaagtaagtattcacgtcccaagataataaaaataaaacaataaactaaaacaaatctcaggtgattgtaattaagattagccaaagtctttgctggtcctgatgtgtcgttgtcgagccaatattaaacgtttcaaaagaattcatgaagaaaaggtttcagtttaaagtctgctcccatgcacttgcatcgaggatttacttttactttgcgtgtgtaagtgttttgactttatgtttggatgtgcacctgagtgcctacctgatgtcttcagaggtcagactcaggcacctggtaccctggaactggagttacagaggttgtaagctactaccggattctaggaaccaaacttggatcctctgctggagcagcaagtactcctaatggctgagccgttcctctagccaggcacttaaaaatagcatgtgtgagtgtatgtcagttcgtgtgtgtcagttcgtgtgaggtgcacctatgtacggccatgctggtgcgcacacatgactgagagccacaggaggcttatggtgtgccatttggaagaattcagaaagacagcgcttctcattggcccagagctcaccaattagactaggaatgctggccaatgaactcagagatccctctgacctaccccagaacagagattgtgggtgccacatggacttcggggattgactcttcctccagggcacaaggcaagggcttttctgactaagcatccttgtagtcctgcctgacacatttagatttacattgcatcacaggactccccagggctctttctgtgcctgtgtccaggcagtccagggagagtcaacagcattcatttcccatcctttgactgatggttcaagactatggacggatgcctacgtttgctgagttcaccttgtctgcaaaggtcaacatggcaggcctgggagccaagtagacgctagtgggtgagcatcagcgtgtatctgacatcgagtttacagctccatgccatccgttggaatggtctctgagtggtccacctcacctgtcgttttccagcgcagagtaagccagtggggacgttcggtggaagcgcagggaatgggctgctgggggtgtgggagggaagacaaagccacagcaacactccttcagacggagtcccctccctacctgtctctgagaacggccgccccataaagggcgtggcagggaacccgagccttggggaggagggtcacgaggctggggccggaggaaggaggatggccagagcctgtaggacttggagcacagggtgggtgaccctgtgctgatgtgtcgtgtccttcagcggctaacaggacctgaagcctccccacaggtccccgctgtttccgccggtgccccctcggagtgacttgggccccaggtgagcctagccaggcgccgccccggggcatcaggtgtcctcggaaagtcgcctgttgcgctcgggaagggagccttgtgtctccagccgtggatggcacaaagagggagggtaggggaccaggacatctgagccatggagggcacacagaggggaacggagtgcgagatgcaccggtttggcacaatcggggctccgccacggacctcaggtcagtggggcgcctggtggggtgggaacactctgtgtcacctcggcaaggtttggaggtgaccgaaaagccctacctgtctgtgccagtttagtttcccagactgtgagaatccaatgccggatgccacccccagcccagaaacccccagcccagagcgtccgttatctctgggaagcctgtgatcctggaggctcactggactgcttcccactagcgtctgagataactctcaatggctctgtgtctgctctaaacttggactcaatttttattacaggccctcggccagaggtagaaatggggcagtagcctgggttctgtgcttgtcagactgactccagtagcagaccggacagaccttactttctggctaggagccagcaccatagaggtagtcccatggcatgggagaaaaagaggaaggaggcacgcattgcagagagatgagcactgttctcattctgtaggagcaaagccggaggttccatgtgggcctagtgggttgcccgaagttaaagacttatcaaattgtagaggaaactagggaggagagaaaggtatcgtctggtgaaatgggacaatgcggaagaggccggttgtggccgtttctctctccaattacacctcccctttctgcagctcaacccaatttagcttctggttgctttaagtaactgtgtctgactagggcctgcaccctgacccctgaggtagacttctgcagaactccttgacttcaaagagcagctgtcaatcaatacctggtcagttcagtgagggaggcaaatttcacagtcagccccggaatgagagccagccctctggaacaacctgagcagcgttttgaataaattaatggtcgttggctgttctctctttgtttctctaggttacggttacatagtgtctgtctatcttgtgtgcttaaagtttaattttcctctgtaatataatggaaagggggttgttgggatttcaagtagttcacaaacactttattcagacaaataaaacacacactatctcaacaaattcgatattgcagttattcatatgtagcaaccaacagaacttgttttttaaattggacatagtagggtttctattgctgtgataaaacacatgaccaaaagcaactgggcaagaaagtttatttcagcttgcgatgttcaggtcacagtccatcactaggaagtgggacaggggcacaggacaggcacctgacaagccaggctctgaagcagaagccacgaagaaacggtgcttgctggcttgccccttggggcttgctcagcttgctgtcttattctacttaagcccacctacccagggatggctccactacctacagtgggctgagccctcccacattaaccttaatcaagggaaggccctacacatttgcccacaggtcaaccttacagagatcttttctcagttaagagtccctcttccaagatgtgtctagtttgtgtcaagttgacaaaaaccaaaccagcacaaagtctcaaacatagcctcctcaaatactgtctctaatatcccactactttattttagttcgtgtgagacaagctctctgttcctcggtcatatacctagcctttcaggttctattcttgatagagataagacgttgaacaaaccccctgagaattaatggcttttccccctttcctttatgcctttcccttaaggagatttgagatgcacttcggaaccaggaccattaatgtccgccatgacagttttatttggaaggaacccagtgcattttttacatagtaacatgcgttgtgcattattttcttcactcagcagtggtcttattaatctttttattaatcaggaatttagaatgtctcccatggctgacttttatagcccaaatctacattgcaggaatgctgggtttgccgggaatgtggcaatctatatcaaatgtgtgattctggacttagaaagctgtagatacgatttctcagatgttgtataattgtaggctaaatttttctccctttgctgttgagtataattctttatgaaaacattaaactcaggagggctttcctgtgtgtgtggaaggactctattgtcttggtgagtgtggggtattttatttaaatgggtttccatattatcaatgctagcctaagggaaactcctggataactgccactctctggagagacttcttccttagtctgaaaaagcctactatttggtatacccctttcaaagaggtattccaaatagtagggacacgtgcctcaaagggtgaaatgagttagtaagtataaggaagttcaagtgggggggtcacttgggaactggactgcagttgagagcctgccctcgatgatgtagcagagtccagttctggaggctcgctcacactgcccctcgacgtaacagtggtatcagaaagcattcctgaccactgaagggagagggtgaggctgccagcttacactctacacaaaggccttatttgtatttggttgaatgtttcttacagtcttatgaggatagatattattaccattttgcaggactgaggctcgatgtaggctgagtgagatgattcaagtcatcgatgtatcaagatccaaactggttcttggttctgtataaaacctacttatggattaataagtacatggaagtttttgtttctcccatgagaaggagttgaatgaccatatccacataaaaatctgcatatcatttcagggtctgtttactctctgaagtcctttctcaacctctcaggcctccgatcttggccgtgactgtatctgttacccattgagctggaaagcacacatatattgtatacagctgtatgtgtaaacatgtcttttttttttttttttttttttttttttttactgattggagcagtccttggatttgttaactttcacctaggtgagaattcacttaagtagtcgaaacaagtgaggaactgaccctctgtcctagtctgtgcctacctagtatggtataggaatacaggacaccctatgtatggacactggagcagccatgcagggtttcttgggcatagtaactaacagcccataaagtagtttttatgtctagggagcacagctgggcctcggtcacctgcagcaatctaaggagcactcataatctttcagggacttccattccggtaaaaacgagatccgtagacttaaatacagaaaaagaattccgagactagtcaacatgaggtagaggttaggtttattaatgatgtttaaacacagtttctgagcatgagggttaaaagagaaagagaggggacccaggagaaagaataatacattctcatgtgtgggcatggacttctcaagagagggacctgagtacccgcctagtgccttagtattagcttcaggtaccagcttggtggatttcaagtcacattgcaaagcgctgctaagaaacttctttttctctcatctgataaggacgatgctagatggctccagagatatcttagatggaattataatctaattaagcaaaaccaacagccaccacgggttgcccaaggggttcgtaacacggccttttccgttaagaggatttcctagtcagacttctagaaaacagcaggttggaaagggagaaaggccttaagcaaaggttaattgtggctgaatatttaattctctgctggtgagaggcttgaaccgcagactctgccagcgcgaaacgaagagcgcatcacattcttttctcctgccccgcccccacccaccctcccattccccacctccccacttcctcctgtctttctgctctacctcgcggtctgtgaccctttgttcaggcttctgagcctctgcagtagcaaacaccgcgggcctgggcctctcccagctgagtggaagtgtttgcttccttccctagagatggcaaatcccgaggtgctggttagcagctgcagagctcgccaagatgaaagcccctgcactttccacccgagctcgtccccgtcagagcagcttctcttagaagaccagatgaggcggaaactcaagttcttttttatgaatccttgtgagaagttctgggctcggggtaggaagccatggaaacttgccatacagattctgaaaatcgcgatggtgactatccaggtaagcatcctcctgcaggagttaggcggagcctctttgcatagcagagaaggtggcactggttcctcaaacaacttttaactgcacctgtaaggacagacaataaataaagatttaaaaatttaaacccttctcccttcgactttgtttctttgtttgtcctctctttctttctcttgattcttttttttaaaagtttttttttttttggagacaggctcactatttaggcccaattggccctgaacttccatgtagaccagacaggccttgaattcacaagagacctccgtcttcccagtgttggtaaagtgtgtaccacgacacccagctctttctcatttttttttattatgataattttaatgccatagtatttttcaggaataaacatttttagcagttggatcctcatgaaggcctttcttgagagttatctacatctctcacagatatcatctgattcccaacatgagttctttcttttattcctaatatggtgggcatttctttctctagaaactgcatggtgttttgccacaggcaacttcttggattccttagactccatgattcctccagccccaatcctgaaaaccgtggtgcagaagattacggggttggcagcaggggccgtgcatcgcctgtggaatgtgcgccttcattttcgttagaaaggaaaatctcagtctgccttccataacttctttacatatttttgaggaatcatgtttttgtgagagttgcccacgctggtggtgtttattattaaaacatgtttggggctgacaaggtggctgtgctggtaaagggtgcttgccaccaagcctggcaacctgtgtgtgatttctagaacccacatggtagaaggtgtgagctgactcttgccaattgtcctctgacctctgtacacgtgtgtaatcgcaaagaaaaaaaaagggtaaaaaaaagtttctttttctgctggtgagaggaaatacctcttgtaaaaagcagaaaggaaaaaatgaagacaaggtttagatttgcatatttattttccattcttggtgaacacctgctattgaaagagagggtattttttgtttttgttttttaatattgagattgataatcttaattgcttactggaagcaagcacttaggactagcagaccaaggcagtttctagagtcatctgaagttggtagaattcttatctgaactggggtaacccctcatcccagtagagcagttcatgtcattgtgaccaccctcccactggggaaatcccagtctccgccttacagagtgggacacggatgcttacgggtttaaaaggctgcgtggctcatacatagtaacatggaagcaggcacagtttttctttaatatatcaccaagaaaacatgctcgattcccagtaaatacttggcaacccgcacttgaaatccttaatttccaggtgataatgcaatatgtcacagcactgaaaagcttatttgtgccatttcaatggcggagcctgtatcagctgggcaagaatgctatttacttagagtaatactagggcacacttgggcggtggctgtgtgccaagctcagcgctttatacatgtgttcatgctcacgtcttaactagacctgagcggtgcatctctgcctcgggcagtgaacaggcttagtgtgcatccctgtgggatacaggagaccagagcagagaaagtgatgcacacattcggagctgcacactctcaggctggtgtcctgaattactcctcgtcttttagaggaatcatctgatctcccaatagttactcgagtggtccaggggaaagttagtcggtttaagccttttggtaagaaacacacaaaggtgtttaagtaagtgtttaaaaagggacatatagtttgttttggagatgagatctcaatctattgccagggctagtttggaaatcactatgaaggttagactggctgccaattcagtgcagtcatactgccttagactcctaagtgctggaattacaggcaggacaggctggagccttcaccgcgcctctctccccctctccggctctcgctcgcgctcacctctcccccccccctctctgtacccctcctctcccccctcccccacccttgtgtgtaaaatacaacgggctacaacggccacactttaccatgggaaccccgcggtacacttgggcgatccgatgctacacctccatgacgcggcggtatatcgggcaccagcatgagagtgtgccgaactgactgtgtggatatataaaactgaactggaatggggtccgcgctcggattcgtactactggtctgccttggcaccacatccaataccatcttacctctccttccctacccctcttcccccaccctctactaataccatcccacattaccccgcttatcccacataccccgctcaccccgtagcccgaccccacgcgtaccccgcccgcaccctcgatcgacaggctgtagattggtcggcttccaggcgtcatattcagcgannnnnnnnnnnnnnnnnnnnnnnnnnnnnnnnnnnnnnnnnnnnnnnnnnnnnnnnnnnnnnnnnnnnnnnnnnnnnnnnnnnnnnnnnnnnnnnnnnnnnnnnnnnnnnnnnnnnnnnnnnnnnnnnnnnnnnnnnnnnnnnnnnnnnnnnnnnnnnnnnnnnnnnnnnnnnnnnnnnnnnnnnnnnnnnnnnnnnnnnnnnnnnnnnnnnnnnnnnnnncacacacacagtgtgtatctctgtgtgtccatctttgcgcacgcacgcgcgtgtgcacacacgtgagctcgtggacatacaaatgacatgcatgtggagatctgaggacagccaagtctcctttaccttctaacaggatctgccgttccccactgtgtacaccaggctacctagtgggcttctggatatcttctctcctgtgtccccatagtcatactggactgctggcttgtctgtggttctagggatttgaactcaggtcctcatacttgtaagaaaagtgctctcattcatggaatcatctcccggcccccaagtcgagagccttctgggtatcctgcccagtccctcacagatgcttgccagtcaggcctctatttcttttctcttcaaagtttttcatcctcacggtatttcttttcttctttaagctggttctgtttggactaagtaaccagatggtagtagctttcaaagaggagaacactatagccttcaaacacctcttcctaaagggctacatggatcgaatggacgacacctatgcagtgtacactcagagtgaagtgtatgaccagatcatctttgcagtgacccaggtaagtcaactgtgcttcacgtgttgattttgtctgtctgttttaggtatcaagggttaaactctgggccttacacgagctaggcaagtgttttaatagtgagatatccagacagtgtgtgcattcttgggagaaagaacaggctggagaaatggactatatagaaacccacactcaagcacgtgtgctcgtgagcatgcaaatgacatgcatgtcatttctgcttggagataacttatgaataaactatttaaatacagtttaagggctgaagggatggcttagcagttaagagcacttgttgctctttgagaggacttgagtttgcttctcagcatctttattgggcagctcagaactgcctataatctcagcttcaggggaatctattgtgtttttggccttggctggtatcccttcacacacacacacatacacacacacacacacacacacacacacacgtgtaaaataaaacagatatttaaaaattgatagaaaaatattgctatactcatatacaagtaaaaactgatttaaaaaaaggatatgattcctaccgacagaaaggtaggatttcaatgagtcatttaaaagaatcagggataggacttgatgtgagagcttcaatattcaaaattactaacaggatataggtagtcattaagtcttcaaagcttatacttttggagacgtataataactaacaagaatattaattttgcagtttgggtaacaagcaaggccttcaagctcatgtaaaagagaggcttttatgccaggcctggtgatggttgttctgtgatactgagtaactgactgcctggcagaaaataagcttgtttttcatcctccagactcaagttttcattctgggttattcttgctataattagtactttctcaaggtaccaaatcacttcttttgaagggataattaaaagtgcttttgagggcagtgtttttggcctaggttagcctcagaccacattccaaaatcattaaatcccttctttaaacacgtcccggagcagccatgactcctcatttctggaagcagcttattcaaacagaggccatgagccactagcatggagcaccagcagcggctcagatgaagctcatctttctggaggcaggactcctgctagccttgtggacaggaagcctagtgtgtgtatgtgtgtgagagtgtgtgtttatgtgtgtgtatgagtgtgtgtgagtatattttccacctgaggtcagagtcctctgtgtgtgtgtgtgtgtgtgtgtgtgtgtgtgtgtgtatgagtgtgtgtgagtatattttccacctgaggtcagagtcctctgtgtgtgtgtgtgtgtgtgtgtgtgtgtgtgtgtgtgtgtgtgagagagagagagagagagagagagagagagagagagagaatgtatgtgcatgagagaaatagagtatatgtcttaattaggattttattgctgtgaacagacaccatgaccaaggcaactctaacaaagacaatatttagttaaggctggcttacaggttcagaggtttagtccattatcatcaaggcaggagcatggcaatgtccaggcatggtgcaggaggaaatgagagttctacatcttcatttaggaaaagactggctcccaagtggttaggaggagggtcttaaaggcaatacccacagtgacacacttcctccagcaaggctacccctactctaacaggctaatggtgctgctccctggaccaagcacattcaaaccaccacagtatttatttgtgtgtgtgagagaatatgtgtacatatatgtgtgtgtgtgtgtgtgtgtgtgtatggtgtttgtgcaggacatgacatttgagtgaagcacagaggacaaccttagtttccagtcctcaacttctatcttgtctgaggtcagagtcgttttcatcattacatatactaagctaggtggcctgtgagcttctagagaatgctcctgtcactgagccctgtcttatcgcagggacactggaattacagaggcatgcgactgtgcctggtttcccatgggtgtaggggatttgaactcaggtccttatggtctggtggtaagtactttacacagtgagccatctctcagccctagatttaacttttaaatgtattaactatctgtaaaacgttgtactagatttgtttgtgtcctagagggtatgcagagacaagaactaaaccatccactactttttgttgttttgagttggggcctgatgtaacccaaagtgacttcaaactcttggaagcagaggctggctttgatctcttgatcctgctgcctccacttctgaaaagcaatccctatgcctgactaaaggccaggtaaattctttgtaaccctttcttagctttatcaggagggccacactcagccttcagaacactgtgtctggcactggaaccactctccttgctagatctccgtgtcctctccaccaggagtccttatcttagctgccacacttctttctgctactataggaaaatatctgtagtcgatatgtgaagccgtttcctcctcacagttctgagaggctaagatcaaggcgtctgcatgcttagctcttgtatctccctgctgtggcctccgtgatgaaagggatgcagatgggtgaaggatcccctagtccctccggccctgttatgtcagaactgtgtgggctaccagatcaaacatagcgtggtaatccctgcatctggctgttttttcttagtccccactcagtggcctcaacacctctgctttctaaagaatccacacacacacacacacacacacacacacacacacacacaaaaatcatagctcgtattacaaaatactgctcatgcgatagagagattcatggtctgttggtgtccatacatacatctaagagagacatgtgttctgtctgtattcacaaatgcatctacacctctctcagtgctcactgccaggcatttcctcggactcagcaactggcccttctgatctccatcactcttctttagagcctctccctccgatgcagcatccgagggtgtatttactgaatgtctgcaccccgaagggagacatggccagcaagggctatcatggctttgcttctgccctggctggcacccctttggccctggttggtgttccatttctgtctctcttttcctgtgaagtacttgcagcttcagaacatctccgtgggcaatcacgcttatgagaacaaggggactaagcagtcggcgatggcaatctgtcagcacttctacaggcaaggaaccatctgccccgggaacgacacctttgacatcgatccagaagttgaaacaggtgatgatcccctataacctccaactcctgtttttaaccccttgatttatacctaagccctgtgataccttcatctctgtaaacatcgatggacagtaccctcatggcataggaagaactatacaaaagttcttacgtgccaacttctatagtgaaccgtttgttataaaacttaggccagacagtggtgccgcatgcctttaatccctgcacttgggaggcagaggcaggcggatttctgagttcgaggccagcctggtctacagaatgagttccaggacagccaaggctacacagagaaaccctgtctcgaaaaaaaacctaaaaaaccaaaaacaaacaaacaaaaaaacctcatgaattcaaaaggaaaaacaaatagggaaagcatcagggaactagaggcagggagagcaatgatgttctgagacagagcttgagtctttctaaatcgtcaaccactccagaaatgtcctacatcttaaagacagtagacacaggacaagggcagcgatactgagttcttacagtcttgattctaaaaggaatcgatatgagcagctgatcttgaccgctgtcctctggaaatgcagtcatatctatggctttgtccctttctgtggcagaatgtttccttgtagagccagatgaagcttcccaccttggaacgcctggagaaaataaactcaacctgagcctggacttccacaggtgaggaaaatggaggggcacacagctcagctctgtgtgtgaccccctcatctcaagcatgctctggaggggcacacagctcagctctgtgtgtgaccccctcatctcaagcatgctctgctttccagacttctgacggtggagctccagtttaagctcaaagccatcaatctgcagacagttcgacaccaggagcttcctgactgttacgactttacgctgactgtaagtgtgggttgtgctccatgtggctcctacctagagaaaaattattttaaccaggtgtatggttcatttactggtgctaaggcattgtcaaaaatataggaagtgccactcgaatgtgccggggacattgctctgaccagctctagtctctgcatgttgctaacttgctgtttgtcttctggcccttggtgcatgttctgtaagtcagggactcgcctgcgtgttactgtctccagtgtggcacctgctgcacagcggatgaccaagtaccaaaggatcacgatcatgaagggcataacaaacacatatgtcttcaaatgtcgtaacttttgtccccctgtgatattcttctaaaaaccctacccagcatacttctgtcttggggagagccatcatctgctgaggcttattgaaatgtgactcatatatctgctgagtccctatctgtccttgaggctctttatgtggaaaaagaataatttctcattggtgaggacttttcactccaccaaatgacactggcatctcctcgtgtggggtgtgggctgtgttcttcagccactgtgggcagcatagccaatggcagtggcttcatttgtgtagggagaggggctgatactccatctcaagggcacgcagagtgactggactctttgaagttacttagaacctcatacttgaagctctgtctgccttctctgtgtggagaaacttcaacaaaacccaacggcagaggattttgagcacttttaaaagtccttcgagaatttcatagacaagtacaatgtattttgatcatattcaccagcactgccccccctccaaatcctcccagaacctgttgtacaatcttcccacttagtccagtcgtcgatgcctcagtacgcacaggtaggagttatctccagagcatggataacgtatcagaggccacatatcccaacaaaatgaatgactctctcccagtagccatcagatgccaacagctcctcagctaagggcgtggtctcatgtgtctatgatgtaaagtcagctgacttgattttgtgctgctgtgagttgatgaaaacagttgcctgttacgtcctccccacattccgtcttacagtctttctgccccatcccttctgtgatattccctgagcatgggatgggggtggggcacagtaaggtagatattcatttaggactaagctgtaaatgaaggactttcaagtgaaccttttccattttttgttgggaaaggggaagaaaaatatagatggattttcttgcctttccttctttctctctgcatggaggaagcaagagagttagatggagacacaggaggatcacgcaaagttttgtgctgtagctttgtgctgtttgtactgagcatcttcaactagttatctcagaagcaagaatgctagcaactctgtcaccaagccctttgtaatatgtgggatgtcagagtgatggagaaatataagcctagaatgaaaaaaaataaagcaaaacacctctccacttggagtgtctaaggacgatgtccctctgtgcttgtgtttctgtatttgcataatttgcctgaacaccaaaagctatctgttgctaaggtcggttgggaaggtgtacagaggaaacctgtacaaattcagcaagtcaagtgtctggaacagaagagagagcactcttgtttgctaaggtgtccagggctagaatgcatcctagaaacacgtggtttagatgctaaaatctctctactgcagatctaattcagtgttatcacctcacagagaaatgaaggggcacactcagggattagcagagaccggtaccagctggtcagaagcgaggatcagcatgtcctgtgtcctctgaagaactgcttcctggtggatttacagacctatcttgactctcaaacctagtcacgcatcctggaccccttttcctgtttttacagataacattcgacaacaaggctcacagtggaagaatcaaaataagcttagacaacgacatttctatcaaagaatgcaaagactggcatgtgtctggatcaagtaagttgtaagctctactcattctcaggatgctaattaagtcattaagcatcacattactacccgcaggatgtagggaccacgaagtaaaagactgggccagtcccaggcccttgaccttctgaaggcagattgggttgctgtagatgtctggtgattcagtcagtacataggagcatccaacatctccttaccttctctacagtccttactgactacatactcaccgttctgcactaaaagaacacgcatacctattttcctcactcaatatctttaaatatctcaatgggcagcagaatctgtacattcacagatgaagaaaccaagggtcaggagcgatgtgtcttacatcgagggagaagggaagacttgaccttgaagctatgacattgtagttatctttcatctggcttaaaaagcagagtgatgtgggaagaaaaacctgttctagaaacacaaacaaaagatcagattagaatgagtcctgtctggaacaggaaaacactgccaggaaagaatttccctgagctgttatctaggtaggtcctctgatgtagcccagatcgtaggttgtgctgcctttcggtcatgactagataacacaagagattaattacatgggctctacggagaacaagaggaagaatctttgatacctgctgagatgtgctttccacaagagagttggtagatctgagctgggtctggactgtgtgagtgtcagaccaacatgatggtagtcaccgatgtacagtttgtgtatgagtgtatggcgctctggaaccacaagcctcactactgtcatagacctacctgggtggaatacaaacttggagcagcatctcacatgggataaatgggagcatccaaagtgcctggcatagaggctgcctctcaaacgcttgcttttggtttttaagtctgtctaatgcagtgttagacatttgggcagccattagaagcctctgggcaaacatcagaagtatggtttattactgctctttctgaaattgcttcctcacagtagcctggtagagataaactcggaggactcggtggctgctgccctcttttgatggcacctgcttgtgggccacgatggcatttatgactctccaggatttcaatgtctgaaaaaaatggtcttctctcctcccccaactccccttcctcctccattctctctctcttcttttatttattttttctttcttttattcctctcacttcttttcttcctcctcctccattgcttagacagggtctcttatatagcctaggctatcctataactcatgatctttctgccttgttctccaagtgctgggactttaagtgtgggccaccaagcctggcagaaacggctcatttcttgcttcccaaggctcagttaaagccttgatgaggcctcttttctggctaccttctccagtgtggagcaatggctctgaaacatagccttgtacctggagggttcagggacattatgacttctgattcagcagttttatggcaagagctgaggatatcttctaacaaaactaaaaacaaacagaacaacctgatgcacagtggtggtgctgtgaacgtttaaacgccaaccgtgctgcttatttatcatgtggccttggcacatgatgggacctccttgtgcttcagttttctcaagttcaaagtgggctaagcatggcagtttcgtgggggctgttgtgaggatcctgtacacacaaagtgcgtggaatagagtcaggtgggaagtgtgctgagcaccatctgtgtttgtgacttaatgtctcttgtacccctccatctatgcctattgtccatgtacctgctcacttctttgcttgtctcacgtcacagatgctcctgttaggttcagggtcttgtctgttttgttttctactgtgttccaacacctggaaaagtgccaggtacatgaggatgctgaatgggtattttatacccagctaagtatcttatcaagcaatgtaggagttggaaggcttaattactgattgattgactttttttttttttttggagaggatttcactatgtgtagcccaggttgaccgaaaacttagtatataatccaagctagcctagacttcatggtattccttctgctgcttgcttccgactgctgggataataggtgtgcatatcacacccacaaggagaacctattcagtataaagactaaaggctgataatgaaagatctttgatttgtttttggttttcttggaaggaccttcagcttttaaaaaaatactaatggaaagagtgctcgcaggacttcctgtccttgtcattctgaaatgtttgaattatctgaattatttgagaaagaagtcacatcatcgtgttaatgtttccatggccctctgtcttccagttcagaagaacacacactacatgatgatctttgatgcctttgtcattctgacctgcttggcctcactggtgctgtgtgccaggtctgtgattaggggtcttcagcttcagcaggtaagtgctgctccccaagacaccgctgacgcgctcagccacactgaagctcacggtgtctctcctcttcccaataggagtttgtcaacttcttccttcttcactacaagaaggaagtttcggcctctgatcagatggagttcatcaacgggtggtacattatgatcatcattagtgacatattgacaatcgttggatcagttctgaaaatggaaatccaagccaaggtaatactgttcttcccaactgtgcagtcacaatggtaaaatgtatttttccaaactgtgaaaaaattcttctgggctttgtattcagttaacttgaaattgacaacagcagttttcttaactctagttaagtcttatatctagaagtctctctctctttctttctctctctctctctctctctccctctctctctctctctctctctctctctctctctctctctctctctctctctctgtgtgtgtgtatgtgtgtgtgtgtgtctttgagatagtgtctctgtggagccttgactgtctaggagctctttctcacagctctgcctgcctctgcctcctgggtggtaggattaaaggcatacaccaccaccactcagctactagaagtctctcaagcagagttttaaaaagcataatccacaaacggataggccagttaatctgagtggttagatcgagagagttcaaagtctccaggtcacatacaccaaaagtcatatacacaccagggaaattctgctaagagttgttaagaggtctcacagaaaatgttaaagttaagatattagaccaaaaaataagaggaggaggaggaggaggaggaggaagaagaagagaaggaagaggaggaggaagagaaggaggagggtgggaagaggggaatgaggtcaacttctgtttgagtttctaccttatttcctttgctctttcaatgtaaaaatatgctcatgttcttttcccattgatattattctcccaaaataagattaatctagtctagaattagtctttcttgccatacaaacaaaaattaacaatgttcaagtgaaccttgtcagcgttatactttgctagtcttgtcatccaggacctggtcgtaaaccgaggcagactccaaacacaggggctgggtcaaagggcaacttgcttctcatctctgaagcagccagggtggggctttaggttgcaggtcgttcagggacctaagctctctgcatttcgttccttgccagatgctaagggctcatcctgacttcacgattgacacagggttgcctcatgagctggctccagcctgtgggaagtgaaaataccagatggtggcagccttccggtgtcacgtggccatggctcaggagtagcagatttcattcctgttcacacgctctagagtgacattagtcaaacccacctgcacggggctgtggggaagaaggacacagatgcctgagaagaacaggggcaagaagaggcccaccatgggccagctgataccataacatggctgtattttcgtgtagtttagctttacggaaccaaaaaaaaataatcatggtggatttatagttaatatttatttattttattagttttaagggagtatcatatgcagaccaggttctcttcaaactcaccatgtagctgaggctggccttgaactctgatcttcctgcctccacctccccggttctggtgttaaagggatgctccgtgcatgacatcttttttctttttatcaactaccatttccttccttgagccttcatagtgtccagcatggtcttcatttttctggaccatcctcttcccttctgaaacctctggcacttcctcctgccctcacctcacttcctgtttcatagcagtaagagacaccccttccttgtctccagtgtctgtccattctgatactgtggatgatttaggctgctgtccaaggctagctccttcacttgcctctcaggagctggccccaggttctttcttctctctggcagctctttcctcctgtaactccctcatactatgtttttgcttcttctgcaaaattaaattcccagatcctttatccagctatttcccatgtctctgctccagtttataggataaaagatatcaaagtagtacctaaccttgctgattctaatcccactactaactgctcttccaggatgtcttccaatctggctgtgtcatgtagccatggaaattcctatctgctgtcggccgtggatcgctgctctctgtcctgacctgccggtagcttcccactgctggtttggttagcgtgtgttgcctttccgctgaggtgactcttaccaggttttctccagatcccggtctgtcagagttttcctagctgcttcccctccgggcggccagccctcagtgtgaggatgttttaaggcatcctgtttgagcagcccttttctgtcactgccttggtattgtcgtcctgacccagatagatattttggtaccactgtaccaacatgtgtcaaatctgcaccttaaagtctctatgttgcagcctgcatagccaagtgtcaaccttccatcttgaccgtctgcttatcttctcagatttaagtatccaactcagaactccccccagcgctcctcagtccagatcctttctcacactgcctttccagcccttgaacggcacctctcagtgtgttcattacctcaaacctcgcgttcactgacgctcccctcctttagaaaactcctctctcctatgcctaatcttagcgggaatttatgtgttctgcctctgagaaggagccggtcacctttacaggctgcacccagtcgtcacctgctctcacattactccaagccctctgctggcagtctgttcgccatgcacccgaaactcccatgcctctcctcttctaggctctcaaatctccctgaccctttttgacaaaaacaaccttagatgtctgtgtgttgcagcctgagtgcccgtgagggcttacactacccccccccttacctccctccactctatctgcttctcacttcttgtcaggctccctgctgcctccggttctttgtatttgctgctctacgagcccaaggctcttcgaggttttgggttaactttctccctcatttctttgcttccatgtcacttgttcattgaggttgttactgctcatcctgttccatgctgcaagctcacacccattccttacctctccccacacccgtggtcatcttcctcagcattcaccatcactgaatctactggaggctgtgttaatctattgctgggttttgttccgtatattccactagagtgtaagctttatgaaggttaaaacaaacaaacaaacaaacaaacaaacaaacaaccccaaactatctgttgctttattcttcacatctagaacagctcctggcacatagctatttaatatttcttgcctaactgacatattgcaatttaaccagttttccctattctatctagagtctcacaagctatgatgtctgcagcatacttctcgggacgtcaactatgctcgtgtggcttggagttatccgatacctgggtttctttgcgaagtacaatgtaaggaatcctacagagtccacttgagctacttcactactttgactaaagggtggagggatctaacaccctctcttacttccgcagctccttattctgaccctccaggcagcgctgcccaacgtcatgaggttctgttgctgcgctgctatgatctatctaggctattgcttttgcggatggattgtgctgggcccttaccatgagaaggtaccgtattagttaagtttctgtttctgtgaagagacaccataactatggcaactcttatgaaggaaaacattgaactggggctggctcacagtttcagaggtttggtccattattgtcatggcaagaagcctgtcagtgtacaggcggacatggtgctggagaagaagctgagagttctatatctggatccacgggcagcaagaattgtgtaccactgagcctgggcttgagcttctgagacatcaaagtctgtcctgacagtgacacacttccaccaacaaggacatacctactctaacagggtcacacccccaatagtgccactccctatgggccaaccattcaaacacatgcgttaatgaggctgtttctattcaaaccaccataggtactgataatagccagctctcttcccgacattgttaagctcatatgacaaggccaatggcttctatttttatgactactattgtttattcatttctatttttgtttgtgttcaggttggccttgaactcatgtatgtagtcaaggatggccttgaagtcctggtccctcctgcctctaccacccaagtgctgggatggcaggtgtgtactaacacacctaatatgctgttttacccttttttaaatatgaatacttttatttattctttgagaaatttacacatgcacatattttgatcatattcatctattattcctcccaatgccttccagatcccccctacattccccctaacttaatgttctcttttttataacccattgggtgtaattaatgctgcccatatccacatgggctgggggccgtccattggcgtgtgatcaccttagcaagaacacactgactacccccaaccagcagccatcaaacgctgacagtgttgatctttcttacatggactcctttgatctggtaattcagcctgaaaatatggacagtcgtgtatctatatccacatatagatccaataacgagtgtatcaatttataaatcagtcaaatgtgaacacctcatgagaattattgatctgctccgttgcctgacctcctgtttggaatacgttagataagtatgttcctttttaccaccagtgaagttgttcagtctgtttgaattcactcaaacacatctgtaaaactgtacaaaaaaacctgtaggaatatttgaaaagtttgctgtgagaactctcttgactgttagatgttatcatgagttggatgagcttcaaggtgagatgagggaccattcgagtctggaacctgggtgtctctgcagaagcattcatttcaagggtctctttctgcaaaagggaaagggtgggaagggcaggaaggaaagggaagtggagggaagggaaaggaaggggaagggagggaaggtgagggaaagggagcggaggggagagagggagaaggaggaaagggaaaggaagggaagggaagggaagggaagggaagggaagggaagggaaggaagaggagagatgggtggggaggggatgctcgactctgagaggcactgagagagcagaaccgtccttcctgctctagtttaggttgctgcagctcagaggagtgacaagaaagagctacctggcgaagcagcaggccggggcatggcatatgccccaaagcaaaggctggtggcttccttgggttggttgttgggaaaggagcacctggcataccaggtcaggatgctgtcatgaacaaaaatctcccacatgaaggaacatagaggaaaatgaactcttttcacgccttccccagttccgttccctgaacagggtctccgagtgcctgttctcgctgataaacggagacgatatgttttccacatttgcgaaaatgcagcagaagagttacctggtgtggctgttcagccgagtctacctgtactcgttcatcagcctcttcatttacatgattctgagccttttcatcgcgctcatcacagacacatacgaaacaattaaggtaggcttgtcagaagccggaggctctgcctatctagaaccgtgtgtggcggcacagcttggtactcagaggacactgatggggtagagacacacaactaaattataataatcacggaaaagaaaagagtgaaggagaatggaatttctagaatgatgagcgtcttgtttctcagtatttgtgttaagaaaataaaaaaagttcttttttattcattgctagttgtgctaaggatcaaacccagggcctggcacgtgtgaggcaatccctgagcctttgaactttatgtcttcgactgttaagtacattttctaatctcttattagactaatacatgtcagtaggtattgcatgtataaagtagatgacatatgagagaggcaatgttctgtgagagtacctgtaggagatgagggatgctcgctgggagcacctgtgggagatgagggatgctcactgcttggatcccagccaaactctgctaatctaaattggattggattctagctgcctgaaccaggtttcacccaaggaacttccttcacattggctgggaattcatggggttataggcagcctaggagtagacatcataggatttaagctgcatcttggccacgtgtttcccaagtgagggttacggacaggattcacatgactatgggtacaggcagactgggaggagtgagcacaggactactgcagagtctcaggaccatttaacttccatttagcctgggtggctccagaagtgacaggtcctaaaatgcctgggagcgcccagctctccctggagacaccccttccactgccagagctcctctctgagtctggaaggctactggagaggccctagtaatgaagactttcctattcttctgtgtagcactaccagcaagatggcttcccagagacggaacttcgaaagtttatagcggaatgcaaagacctccccaactccggaaaatacagattagaagatgaccctccgggttctttactctgctgctgcaaaaagtaactgttgggcttctctgtgcttgggaggaaaatacagtgtgtggctgagccagagattatttgtgatcacgcaacagtatatgtccagatactagtattctgagttaacaaacagctatgacttagcaggacctgttcatagtttttgaaactatttaatatcttttctgcttacattagcatttttaaaatgactgatttgatgagggaagctaatgggtcttagtcgctgtaggtcttgggtatgttctctttaccacacagcaagccttgtgcctgcactggaaataagctttcgcttctcagaaactttggatgacccagttcccctctctgagagttgggataattattacacatcagacaccatggagtctctccttaaatgaagacagaacaatagagagccccatcacagctgtgtgtgggatgcttggctctgaaggacagtctttgattctcctattcatttagaagctttctgcccttcagtgttaaggtacaagattggaagagagtctatacacggatgaagtccaaatgcacaccaaggaggcatttgattaaacagtgatggctttattagcatccaagcagcattgggggaattggtgatacaatgtgtgttccatgggcctgtgcagtctcaggaaacccatttggggtcaggatttgtggctctgtggtttgaagttctagaacccatgttcaaaattttaaaatgaatatatgtagcttgaaaaggcacagaattaggctctacattttgtagttctctaatgggaaattatggggatttttttgtggtataacatttattttgtgtactatttatccatgtggcatcaattcaattatgtataataatgactttacaagggctcctttaaaaacacaataaaaattttaactctttagtgttgcattagggacataataaagatacctgcttattttgtaatttattaggatacaacataaattttaaaactgtgttgattatctgagaagtccttaatgttattctttttgcgatgttttaagactaataattgtatttcattggaaacacaaaaccactgatccagggctgggcctggagttgcttccctgtgcatgcagagaagagaaagctagctatagactaacaggattggagagctctgggtttaatggagagaacctgcctcaataaattaagtggagagcaattgtggaagactcttgacatcaactgctggcctctacacatgtgtgcacatgcatacacacatgtacacatgccagatatatatctcagaaactgaaaaaaaaatgttaggagaagttaaaagttctgtggagtcaatactaggacatccagggatacacaaagtgactctgttgccaagcaaacagactaaaggaaaagaagcagggtagtgcataaaggctgatctatggggtggggtggactataaggttagatgtgtctgttagaagagaggaaatgtctaaatttcattatccaaatatcttctgggaaattagagaagcatgagaacatggaaaactctggtaagaaaaaaaccaaatcagagagtcaaacaagaaagagtaagtcaatagaaagtcaaccaactcccaaatatagttttgttttaaagatcagtaaagtaaataagccactaactaaggaaagcaatgcagacacaggtattcagaattgacggaaggatctcaatggattccatgcatcgaacactcaagtacccttcagtttgacaaactgcacagctcgacaaactacacagcatggatcaattcttccatgttttgggtgggttccctaaaagttctcctgttagagactgaattcgtcagtgttaccacagttgggtgctggacgtctcatgagaggtgttggggtcacaggcgttgagcccccaggaacagactgatttttctcatggcatgggtgagtgtcctgatttctctcacgagcccccaccagaagctaataataatttatccgaggcaaaacaaatgcttctcctttatgagttactcagcctcaggcattctgtcatagcaactggaaatgagggaagaacaagtagtagactgttgctatggcaacacttgactatgttgaaaccgcagtccaacccactgtaggcccagactgcatcggttttgaagcaagtgttgggaaaggagctggttgtgagagttactcagggtaattctgctgagagctcaggaaaacacggagctaaggacggtatgggagcaaaatggttgaggctgtcacaccaacagaactgtgggaaatgaaggccgaggtgagaaggttgtgtgtagaaatgagaatgtcttccagggaaacagagtgaaagtcgtcctattacatcgatacaagcacagaggccatgtaagctctttctgtctgtaactgaaattagaccaatgtatgccgcagagctcctcagatactcccagtcactcttaaccacttggggaatgtaacagagaagggagagctaaccctggaagtcacaggtaagaaggaaacatggcactgaaaatgggagaattagtagccttttttaactcatggaagagttaaaaaagcatggtcaacagatatcaccaagtatatggctaagctgatgcttgtaaggcaggtctcactcaccagaacaatggagaaaggccccgatgctatttcagaaatcttagagtctgtctgcctctctcatcaaagtccagaatcctagagagggaggaggggctccaggactggctggggtatcttttggggccttatcactctggtggcccaaggattctgctccctgcatcccactgtgggctctgctcagcctcaaccagctgtgcctcgggtgtatccaggtgtgcctctgttccaatccaaagcatccaatcagtaagcctgggctgcatgctgggtcttaagtgggtccagccaccgccggtcactgctgtatctgccgcagcaaacggcacattagacaaatgctggcactgcccactcggcaggtgagtggaatgcaggggctatgaaggtgtggagccccccacttaaacttcagaaggactatctgggagctgcatggggacctgccagcacaggagatggcaaaccctgcaacaggtccttgtctgggagttgggctgggggctgcagttgtgattcctaccatgacaagctacttacagtgctgtgaagacaactctgctccacagagagcagccatgttaattgagccccaacaaactgtgtgagtggagctgcctggagtcttgggggcccactctctaccctgtacttggagtgaaagatgattctcgaggtttaagatgtcatgtctaatctgttgggtgcccgttcatcatcttattctgtggtccactcttctcattgggaacgagagtgtcttctctaaggctgtcctgctttttcctcccagaggcgatgacttctcttgattttacagcttcatgtttgacaggcatttgtcttgatgtcttgtctcagatgacacaagggactttgaagctgattctggagccagttgagacttggaggttattgggacaaatatattccataacgagaagtccatgactggggaagggtataggggagaggctgtttgagtgtgtctccccaagatccatgtgctgggagccttggcctgtgagcgacgtttgggccctggggatggagggaggctttgtgagtggataaatgtcccctgttccttttcctttgtgtatgtcccccctttcccttctgttttctcacatgctaaagtgttcacttaaagccaaacagatgctggtagcagtcgtctggactttcaaaacctgagccaaatgtaattctttcctttatgaattacccagtgataggcattcctgttagagcaacagaagatgaacatacaagacatacaaagaataaattcacacaagggattttagttagtttgacatttcttttctttctttctttctttctttctttctttctttctttctttctctttctttttttttttttgcttgcttgcttccttccttctcttgcttcttatcttctttccttttcttcctttctttcctttttttttcttttttcttttttttttttgagagagagtttagctatataggcctgttgcctggaacttgatctgtgactagcctggcctcaaactcacagagctctgcctgcctctgcctagcaaatgctgggttaaaggtctgtgtcagcacagctacaaaaggatttgagagtttgagtaaggccatatttattacgtagattgaatcagcaacaatcttttaaaaaaagaagtgtgtgctctgcaaaaggcgccaacaggagaataagacaagtaggagaaaatacttggaaaaaaaacaagctaatgaaagcaaatataatatacacataactcaaaattcaacagtaaggaaacaaactgctcttttaaagtggatacagtaactggagaaagtgccttactaaggatgacatacaaatggcaatgatatgaggcagatgctcaacatcacatgtcaccagggaactgcaaatgaaatcaactcctgcacaccactgtcacagtcagatttcaaaacaccgaaaatcccaaatggtggtgagggcatgaagtgaaatgatcttgtttattactgaggagaattcaaaacggactgtaggtggtgccttacaagctatatttgcatatattagtagttagtcctagcgcttctcagcacttatccaaaggatttggacacatgcccacattaaacgacaaacaaaaatagtggtcacacagatgcttaaaggagccctcttcaaaatttacaagtgcaagcaaccaaggtgctcttggagtgagtggatcaatgcctgtggtatgtccattcaagaggacattatcagcgctaaaaggtagtgagttagcaggttatgaagggacatggaagaagcttaattgggtaccgtgaagcaaaagaagtcactgtgaagatgctacacacggtagcatttcaactgtatggtgttctggaaaaggtaaaagcagagacaaaagaaaaacctgcaattcctaaaggctacagtaggtggggaggtcgtggaaggcacacagagggctatcaggccgaatgttcagtcagttccagctgctataacacagtagtaatgattcagtattttaaaccaagcagtaaatggttatttttcacagttctgggagatagaaggttctcaaagttgaggcactggcagtgaagctgccaggtgccaagtgagagcgtgcgttccgttttgcagttcagcgggtgcagttcagacgggtgaccctgatgtggaggaggtggagaacgtgcgggaatcctccgcgctttctgatcaatttcactgtgaacctgtgtctgctctaagaaacaaaatctattttaagaacttaaaataacaacatttccataagccgagaaacagaaccactcccatttccctcttgtctgtacctgttttcacatcacacatcagttgtaacagaggcagtgccatctatcaagcctaaagcaacagagcgatccacaaagcctaaagcactgcccttctcctaacacaaagatcaccaagcccagagttaaaggctacttttgctgagctggattgctttctgcagaaaagctgagtcatccttccctcctaccatgagtgaagttgaagcacagcagaatttgatacagcagataaaaccgagctgctgtgaaggagacagaacacccgtggctttcaagagaaaacttctttccagagatcagagatgctcaggtcacggagattggtattgggttgattttccaccatcaaagggaagacgtagaccaaggaagacttagttcagagattacagtgtttaaaaacaacaaaagattaatatatagaaagttcaaagcttacttatttcatatcatcaaaaaatcagaaggacatgaagccacacaaataaaaagctcatttccctgttattttactgtgttctgtctacacagtgacttcccaatagagactactctggactgcctattataaaattgttgcaggtctactactatcttggcttacattttccagatgacttaaaagaaaaaaaaatcccctttaacatggtaaattcatgaaactgtcgtaagaaggaaacctgcaagagaaatccatgactgtgattggcaaacctgaaatgtctgatgcacagtacagggttgaacaaaacactcttgtgtcgttggaaagctaagacacaagccttgaagcacacacaggtgggtagagcaaaagcttgtgattgaaacacccaacacacagaacaaagcaatgtctagtgctacccagtgacacatgaacctggatcctcactggaaacaagagactctagtgaactaacctctgagtgttttaacagggtgccaggaaaccgtaattcatgtctcccggtgtgcgcgatagcccaaactttcagccgtctgattccaacgattgtccatcttttttttttcctcacctcttctctatccacagctccttcctacatttaggtggtcgttttggggccctttctactttaagggcagcatatgtggcgcctgcgtgagaagcgttttcctgggggatgggggatggggacggaaggaggcgcactgtactgcctggtctcagcgaggcagcttgggagccagtgggtgcccatgaggattgatacccaagaccctcctttaggaagcttctcctctatgctactctctgagaatttacagggctggagagatggttaagtcctgttcccatcgtccacattagaaggactcaagactccctgcaactcttgatccaggggatccaacatcccctcctggtccatccagacacctgcactcaggtatacattctcacacatagacacaccggcattatacatgtaactaaaaataaaataaagcccccttaaaaaaaagattttgctttctggttatatatctacatttacttttattaaaatttgagactgtgtggtgttgtgcaggtcagactggcctgtacttacgttgtgatccaagctcttctccaactcactgcgatccccctgactcagcctccaaaatgccaggaccatagtgcaccacacccaagcttattttaaatagatctcaaatatacttatttgagatacaagtttcattagtaacagctatttagataaatgtatctttaaattttatttagagtttttaattaaaatataataacattacttttccctttcttgttgcttctccaacccctcctgtgtctctctcactccctctcaagtaggtgaccttttgattattatatatcttgttgagtacactttagtatggcttttgtatataggatttcagggctgaccacttgacattggatattggatacatctgcactgactgctcaggggatgccttggaagaggggacagaatgctaaacatcagttatgagacccccatctcctagaaatgacagggacctcatacctagataaatgtatcttttacaactacctaggaaaagacatattttctccaccggtgagactgtttctagattgtcacaggtgggaatctgtttagagaaacatttgccaatgaagaaagttactggacaccagcaactgtttaatgacctgtcttgtcagtgggtagatatagtaagaagaaaggttttggagtgtcagagacctaaatagaaagagttcgtctgctagtggctgtttatgtgacttgggagtagtaacaaatgtctgtgaacacatacactctctctctctctctctctctctctctctctctctctctctctctcgtgtgtgtgtgtgtgtgtgtgtgtgtgtgtgtgtgtgtgtgtaccccacacataggtatcactcatgacttgcagagaccagaggacttgctggaatggattctctctgtccaccccatgattctggggtcaaacccaggactggctacactggggggagggggcagtgtacagaatcctgagcatgaaggtacggtgggcactgtgacttttcagacagactttctcagactttccatacccagtaagcgtatttcctaaaagaaatttggaaaaacaaaaacaaacaaaactcaagcatttttacccagtagtttttggaaagtgactttttaaaacagagtagatttggaagggtgggggtggggcagaatattcctcaacaccaacagcccttgtgaggtgcagacaggaggaccaggttcaaggccagcgtcagcttcatagcaagttggaggccagtctcagttatatgaggttgtctcaaaaagcaaaaaacaaaacaaaacaaaaaacaaaaaccttacacaaagggtccaaaaggctctgtccagctctttctacataatcctctacaaactgtcctttgccctagctaaacatggggacctttcgaacacttcctaacgcacatagcctggaaacttaggggtttagttagctccactgcatggtgacgacaggagcctctgagccggttctgtccaaaaggccctgctagcttcaggttgggtactgtagccaggttcatagaaaccaattgtcttgaagcccctgctttcaggcaacaagggggaagggcatagaggccgctggggtgggctactctgggctactcaggggtcaagcagactggctgcagaaagctgacttggtggctgaggctggggtcttgctttccacatgcttgccctgtcatcctaactacttgttagggagttatcagaataaagactccttagtgaagaaacccatccccacgaacttattgattccaagagggaggagcatccggtagaactcagtaccaacactttacttgtccaaaatcccagcgttggtagcacgtgcttgttgtaatcttagtactcaggaggctgaggccggaggattgctctggttgccagtgtgggccacatggtgagctcaaaagaaatgcaatgaacttttgaaggagtcagaggtctgggggcgggggtggggtggtggggtggggaatggggcgggagggaggaggtcaggacggccaggggggcggggtgggacggacgggcggcctcatagcaggctttccggacgacttccctttataagggcgtccactccacctgcatctcgcagacacccgtaggcggagccgggtgtggggaccgtggggactgagggaatttggggtcacgtcatgcccggagacgaggagacgctggacctgcctgcgtggaaccgcgtcccggacctgacttggggtccccaccacaggtgggtactcccccagtggaccatgtctggtggtcgtctggattccagcgtcccctcctggaatatctcccgccgagaaggtgtccctgagctcacacgtggaccccattctgcctcgcgtccgggctctccgctacgtagcaaaagtccttcgtgacagcgccctgggtcgcccagcgctgaaggaagtcagcggccgagggtggggacgcggggggcgtggcgggaggacagggccacgcgtagcgaccagggtgcacacagccgcttttccgcaaagtcccggggctgagatcagagcgctgactggaagggtaagaggctttggtcccctaaggctttcatttgggggccactgaacctctgggcggggaatgggtctagctccttcagtcccgggagccctggaaagttctgaaggaggatggctggccctgaaactgacggttttcccaggcaagagacccggagagacagagagggatcagatgttttatgacttttgttttttggtgtgtatgtgtgtgtgtgtgtgtgtgtgtgtgtgtgtgtttctttcctggtgacaggactctgaaaagatcctggtttgctctaccttagagttcttgctaccccgggcaaactaatgctaactgcttgcactcggttaaaaatgaggctgattgtttgccttccggaacaaaccgactttttcttaggtgggagggttgcggtgtggtcaaccctggtttccccagctctatgaaaaggcgttcagtgaagccaggtggctctgccaagcggcctctcctgagtttgaatgtctgcagcagcgcaattgagccggggaggtgaggacaaagtggcctttggctcctgcttgctgctcttaaaacaaatagtggcgggctgttaaagttttctaagggagcagggagcggcctctccttcctagcaggatgttcttgaagccagcaaggaaactgagccatagggaagttagtctatgatggctacctgaatggatgcttttctgcaagggtggcatagacttctcagaccttcaaaagaccggttttgaactataaaaccatgttggtggggctacagaggtgtgttcttttcttttgtttttgtttttttcgagacagggtttctctgtgtagccctggctgtcctggaactcactctgtagaccaggctggcctcgaactcagaaatccccctgtctctgcctcccaagtgctgggattaaaggcgcccggccagaggtgttttcttgcaaactcaaagaacactgttggagccaggtgacagtacttgggacctgtaatcccagtgcacaacaggcaggagacaggaggaccccccccccccaaagttcactagccagccagtcagccctaatttcagagctccaggccagtgagagacactgtctcacaggaggtctgtgttgttcctgaagatgacacccacagttgtccccacatgcacaacacgtgtgcatgcatgtgcacgtacacgaatacacgcgcatccacgaaaagaaaacattggagcaactttgagaacggtgaccagttgtgaacgacccatcaaaatgcctgctgtcatgaaacgtgcaaactatgtctctgaaattagagaaggctttttaaaataggccacatggcacctactcttctgtttttccctgaatgtacgtcctaaacactaaggagcagacaactctggtttatgtgcccgctgtcttttggcttggagaaggctgtattcatggtaggcgagatacataaccttaagagttattt

SEQ ID NO: 26 - DNA, 2966 bp, Mus musculus
atgtgtcgtgtccttcagcggctaacaggacctgaagcctccccacaggtccccgctgtttccgccggtgccccctcggagtgacttgggccccagagatggcaaatcccgaggtgctggttagcagctgcagagctcgccaagatgaaagcccctgcactttccacccgagctcgtccccgtcagagcagcttctcttagaagaccagatgaggcggaaactcaagttcttttttatgaatccttgtgagaagttctgggctcggggtaggaagccatggaaacttgccatacagattctgaaaatcgcgatggtgactatccagctggttctgtttggactaagtaaccagatggtagtagctttcaaagaggagaacactatagccttcaaacacctcttcctaaagggctacatggatcgaatggacgacacctatgcagtgtacactcagagtgaagtgtatgaccagatcatctttgcagtgacccagtacttgcagcttcagaacatctccgtgggcaatcacgcttatgagaacaaggggactaagcagtcggcgatggcaatctgtcagcacttctacaggcaaggaaccatctgccccgggaacgacacctttgacatcgatccagaagttgaaacagaatgtttccttgtagagccagatgaagcttcccaccttggaacgcctggagaaaataaactcaacctgagcctggacttccacagacttctgacggtggagctccagtttaagctcaaagccatcaatctgcagacagttcgacaccaggagcttcctgactgttacgactttacgctgactataacattcgacaacaaggctcacagtggaagaatcaaaataagcttagacaacgacatttctatcaaagaatgcaaagactggcatgtgtctggatcaattcagaagaacacacactacatgatgatctttgatgcctttgtcattctgacctgcttggcctcactggtgctgtgtgccaggtctgtgattaggggtcttcagcttcagcaggagtttgtcaacttcttccttcttcactacaagaaggaagtttcggcctctgatcagatggagttcatcaacgggtggtacattatgatcatcattagtgacatattgacaatcgttggatcagttctgaaaatggaaatccaagccaagagtctcacaagctatgatgtctgcagcatacttctcgggacgtcaactatgctcgtgtggcttggagttatccgatacctgggtttctttgcgaagtacaatctccttattctgaccctccaggcagcgctgcccaacgtcatgaggttctgttgctgcgctgctatgatctatctaggctattgcttttgcggatggattgtgctgggcccttaccatgagaagttccgttccctgaacagggtctccgagtgcctgttctcgctgataaacggagacgatatgttttccacatttgcgaaaatgcagcagaagagttacctggtgtggctgttcagccgagtctacctgtactcgttcatcagcctcttcatttacatgattctgagccttttcatcgcgctcatcacagacacatacgaaacaattaagcactaccagcaagatggcttcccagagacggaacttcgaaagtttatagcggaatgcaaagacctccccaactccggaaaatacagattagaagatgaccctccgggttctttactctgctgctgcaaaaagtaactgttgggcttctctgtgcttgggaggaaaatacagtgtgtggctgagccagagattatttgtgatcacgcaacagtatatgtccagatactagtattctgagttaacaaacagctatgacttagcaggacctgttcatagtttttgaaactatttaatatcttttctgcttacattagcatttttaaaatgactgatttgatgagggaagctaatgggtcttagtcgctgtaggtcttgggtatgttctctttaccacacagcaagccttgtgcctgcactggaaataagctttcgcttctcagaaactttggatgacccagttcccctctctgagagttgggataattattacacatcagacaccatggagtctctccttaaatgaagacagaacaatagagagccccatcacagctgtgtgtgggatgcttggctctgaaggacagtctttgattctcctattcatttagaagctttctgcccttcagtgttaaggtacaagattggaagagagtctatacacggatgaagtccaaatgcacaccaaggaggcatttgattaaacagtgatggctttattagcatccaagcagcattgggggaattggtgatacaatgtgtgttccatgggcctgtgcagtctcaggaaacccatttggggtcaggatttgtggctctgtggtttgaagttctagaacccatgttcaaaattttaaaatgaatatatgtagcttgaaaaggcacagaattaggctctacattttgtagttctctaatgggaaattatggggatttttttgtggtataacatttattttgtgtactatttatccatgtggcatcaattcaattatgtataataatgactttacaagggctcctttaaaaacacaataaaaattttaactctttagtgttgcattagggacataataaagatacctgcttattttgtaatttattaggatacaacataaattttaaaactgtgttgattatctgagaagtccttaatgttattctttttgcgatgttttaagactaataattgtatttcattggaaacacaaaaccactgatccagggctgggcctggagttgcttccctgtgcatgcagagaagagaaagctagctatagactaacaggattggagagctctgggtttaatggagagaacctgcctcaataaattaagtggaga

SEQ ID NO: 27 - protein, 570 aa, Mus musculus
SLPTGPRCFRRCPLGVTWAPEMANPEVLVSSCRARQDESPCTFHPSSSPSEQLLLEDQMRRKLKFFFMNPCEKFWRRKPWKLAIQILKIAMVTIQLVLFGLSNQMVVAFKEENTIAFKHLFLKGYMDRMDDTYAVYTQSEVYDQIIFAVTQYLQLQNISVGNHAYENKGTKQSAMAICQHFYRQGTICPGNDTFDIDPEVETECFLVEPDEASHLGTPGENKLNLSLDFHRLLTVELQFKLKAINLQTVRHQELPDCYDFTLTITFDNKAHSGRIKISLDNDISIKECKDWHVSGSIQKNTHYMMIFDAFVILTCLASLVLCARSVIRGLQLQQEFVNFFLLHYKKEVSASDQMEFINGWYIMIIISDILTIVGSVLKMEIQAKSLTSYDVCSILLGTSTMLVWLGVIRYLGFFAKYNLLILTLQAALPNVMRFCCCAAMIYLGYCFCGWIVLGPYHEKFRSLNRVSECLFSLINGDDMFSTFAKMQQKSYLVWLFSRVYKFISLFIYMILSLFIALITDTYETIKHYQQDGFPETELRKFIAECKDLPNSGKYRLEDDPPGSLLCCCKK

SEQ ID NO: 28 - DNA, 49536 bp, Homo sapiens
atctgaagagtactcagcttcagaaaggagaaaaagagacaaaaaagcctgaccctgggacaaagatttagctgttggaagaaagggccaattttggcaattctagaaaaaaaaatggactagaacatcaatgagaaattaggatctatacaacattaaagtcaggagaaaggcattcttaactgcacagaatagcttgagtctactggggactaaggaggacacaggccccatgtggctccagaattgctggcccttcccataagagaaggcagggctctagcactcatctgcagtcttcaggcagtagatatctccagaagggccaaagcaagagctgtggaggtaaaaacagggccatgtggtagcagagtggacttacttgtcagtatggctgagacttaactctctacacccagaaatagttggtggtgggagagtcattgtatggtagtgacagtcctacaatatcataaagcattaaaagccagtgaatatcagttctacatgtataatttttattgtcattagagcacttaaatattttttaaagtgaagtcactcaaatattgtatttaaagtaaggaaattatgttgaagcctaaatttgtcactttctgcataggtggcattagacaagttattaaactctctaaatctcatctgcaaaatttgggatgataatgctttcatcagagccaggccagataaagggcaagagcaaccacattgaacaactaagggtgagggcaaccaatgctgccctaaggggcattcttcaaaagataccaaacttccctgtagtgaattgtgaataggttgtcagttagtttgggtttccatagggaaatttttacatgccaggagagacataaatgtattcttctctcaaccaaatagcttcagatatgaaataaaatctatgttgaaaaattttgccatgtaaaagtaccaatcatgagggtcaaccaaaaggcaatactcccattcctgagttcagcctgcgttgatacctacattttgatttaattttttcaagatggagtcttgctttgtcacccaggctggagagcagtggcatgatcttggctcactgcaacctcagcctcccaagttcaagcgattcttgtgcctcagcctcctgagtagctgggattataggtgtgtgccaccacgtccagctaatttttttgtatttttagtagagatggggtttcaccattttggccagcctggtcttgaactcctgacctcaagtgatctgcctggcttggcttcccaaagtgatgggattatgggcatgagccactgtgcccggcctgatacttatattttgaatagttcagcactctccccaaaagttgtctagtttggaaaagtgtgtttttaataagttgtttcaaatgtaaagaaagaatatatatgtttattaacaaaaatcagtttttccctatttccactagaaaaacagtgaacacatttttaaggggtattagtatgaacagataccaaattactagcctgtccagattgcccacagattttaatctgtcccttcctcatagcattgccatgaaaaaccagatagtgcttcaaatgtggcatattctcaatgaatagctgtggaaccagaattaatcaaaattctgttcaaaatgaatgtatagacattacttctgtcctttggtgactattaaaagtagatttgagtatccaactgtctacgagacatttccacttggatgtttaatacatagttatctaaagcctggcctttccttcaatgccagccaggaaatatttgctactagaccactagtttatgaaataattgttacccagctgcaataaaagtagtactgaaattgggtgtttaaaaactttttagcaaattgacacagtaactttatgttatgtatgaacaaaattgaggttcgtattacaaacgtccttatttcattcttttagcaatttatttatgttgtaattttacagaattattagtctgtgaaagaaatgaaaacaaaaccaagtcaactaaccctttaacagatagtctgagaagcactttacagacatctcaaaaacacactaaaaactgaactgctggttctccccagatacctgctcctcctgccatctttttcatcttagctgatggcaatttcatcttcagggtcactttgcacaaacttaagagtcatacttcacacctcttcttccatccttcatacttttaggatatattttcaacattgcagtcagagggatgcacttttaaaacaagtcatatcatgtcagtcttctgctcaataccctccaacagctccaatttcattccatttaaaagccaaggtcctcacaatggccaaggtccagcataacctggttcctgttacaagcttcatttcctaccattactccctgcagctcacaccactgcagacacactggtgtccttgaggttactcaaacacactaggtaggcatctcctcttttgcattggctgttccctctgcctggagaacttaaacaagatatccttcaagtttttgctaagatgttaacttctcagtgaggcctactctccactctttttaaaatgccaacttctcagccttcctcattctcctttctccgttttatttttactcataatatttatcaccttctaacacactatgtacttatgtttgactgtttttgtccactaaaatgtgaactctacaagggcagggatttttgccgtgcttactcctcctgtcccagtgtctaagtctatgttggcatatagaaggtatgccacaaatgttcattaaaggatttggaacaaccaccttggagagtaatttggcagtatatattaactaaaaatgaatacctcctataatctagcaattctacttctggatatttaccctagagaaaattttacacacgtgcataaggaaatgattcatggatgttcactgctgaattttttttgttttttgtaatggcaaaagatggcagaaacctaaatgtccatcagcagtaaaatgcatagaatgatatggtataatcaataaaatggcatacagctgctaaaataaacttggatggatatagcttaagacaaactggtaaggtaagtgataaagattaggtacagagcaatgctatctttgtaaacaaaaacatgcatgaatgattcctatatataatgggaacatatattcaagaaaagtattacaaatggactgaaatgattcacaccaattcatgatagaaggttgcacttgcggagggttggtgtattagtccattctcacactgctacaaagatactacctgagactgggtaatttataaacaaagtaagtttaattgactcacagtttcacatagctggggaggcctcaggaaacttataatcatggcagaagaagcaggcatcttcttcacaaggcggcaggagagtgtgagtgtgtgaaggaggaactgtcaaaaacttataaaaacatcagatctcctgagaactcactcactatcatgagaacagcctgggggaaaccgcccacatggtccaatcacctcccacagggtctctccgttgacatgtggggattatggggattacaattcaagatgagatctgggtggagacacagccaaaccgtatcagttggttaactttataatgctttattcctcataaattaggaaggccaaaaacaaaagaaaatataaaatttgttcaatttggggggttgtgggtattgaatggcattaatgtattgttatttttgtacttttctgtatttgaaattttctcaaaattaaaaaatcatcttctagactgtaagatccttaagaacagcaactatattttattaatattttcattggcagtatctaataccattactgaaaaataggagtcctcaataaatactcgctaaatatgtatgtgttaaataaataaaaattttgttgagagaaaaagaagaaattaaggggagaaagatgaatggtacggatgtaagaagacagaaacgtaaaaagtattttgggtttacaaatgtgtgatttaatacccaggctacctgacattttcagctgagctgttattctaaaacagataggaattttgaatgcgaagataaggagtgaaaaaagctccctttcacccagcagatatgaagaatgtcatagagatctattggcttgagattcaggagcaaaaaattggaattcttgaaatcataagttattttgtagttttcataacactttacatgttttaaaaacataatgagtaaccataacaataaactgaatcttttctgtgctaggattatactaaaagtttcagaggtttattttggtttaaaaaagataataaaagcatgattattattatcagccaacatactgaagaacagtatatatttgattatatatgataatgatcactacctgtcatagatatttcatagtaaaaatcattaaaggaaggaagcatcaatgcaaaataaattctaaataaaaaattctaaattttaattaaaaaataattcttcaagtgacaatttaaaacacataaaacaatttccttatctgatagatttcatctttgctttgtgacagatattccagatgagagaaaatttctctcattttgcacttcatgtcagttcacttgttaaacgtgcttccaaagtattatcagattggacgttggggtatctgttgctttatataagctcgtttacttttttaacaaaaaaaatattttgttttacaaagaactaaacccttcagtgaatattcaaactatggaaaatgcagaaaacaagattgggtattcaaatacagttatgcatagcttaatgatggggatatgtcgtaacaagtgcattgttaggtaattttgtcgttgtatgaacatcatagagtgtacttacacaaacgtagatgggatagctttctatacaccgaggctatatagcgtagcctattattcccaggctacaaacctgtacagcatgctaccttactgaatactgtaggcatctggaacacagtgtttagtatttgtgtatgtaaacatatctaaatatagaaaaggtacagtcaaaatatgatataaaagattaaaaatgggggccgggcgcggtggctcacgcctgtaatcccagcactttgggaggctgagacgggtggatcacaaggtcaggagatcaagaccatcctggctaacacggtgaaaccccgtctctactaaaaatacaaaaaattagccaggcgtggtggcaggtggctgtaatcccagctacttgggaggctgaggcaggagaatggcgtgaacctgggaggcggagcttgcagagctgagatcgtgccactgcactccagcgtgggcaacagagcgagactctgtctcaaaaaaaaaaaaaaaaagattaaaaatggtacacctgtataggagacttaccatgaatgaagcttgcaggagtggaagttgctctgggtgagtcagtaggtaagcagtgagtgaacgtgaaggcctaggtcattactgtacactaccataaattataaacatgtacacttagactacactaaatttattttaaacatttttcttcctttaataataaattaatgttagcttactgtaagttttttactttataaactttttatttttgagacagggtcttgctctgtcgcccaggctagagtgcagtggcacaatcatggctcactgcagcctcgacctcctggacacagtgattctcccacctcagcctccagagtagctgggactacaggcacatgccatcatccttggatatttttaaaaatttttgtagagatggggtctcccaatgttgctcaggctggtctcgatctcctggactcaagcaggcctcccaccttggcctctcaagtgctgggataaacagggataagccacctctcctggcctaaaattttaaattatttattcatttatttatttttcattgcacaatggaaatggtatgaacttttatttattttatttttattttatttttgtttgagacggagtctccctctgtcacccaggttggagtacagtggtgcaatcttggctcactgcaacctccgcctcctgggttcaagtgattctcctgcctcagcctccagagtagctggaactacaggcacccaccaccaagcccggctaatttttgtatttttagtagagacagggtttcgccatattggccaggctggtcttgaactcctgaccttgtgatccacccaccttggcctcccaaagtgctgggattacaggcgtgagccaccgtgcctggccaaacttttaaaatgagtaaactttcttttgtaataacacagcttaaaacacaaacatattgtacagctatacaaaaatattttatttatatccttattctacaagcttctttctatttttcaatgttttaaaacttttttttgttaaaaactaagacaaaaacacagacattagcataggcttacacaaggtcaggattaacaatatcactgtcttctacctccacatcttatctcactggaagatgtccaggggtaataacaggcatggaagtgtcatctcctatgataacacaatcttcttctggaaatcatcctgaggctatttgacagctggcttttttttttcaagcagaagtatactctaaaataatgataatagtatagtaaatatgtaagccaatcacatggttgcttattatcattgtcaagtattatgtactgcacataactgtatgttctacacttttatagactggcagtgcagtagtagtttatttacaccagcatccccacaaataggtggataacgcattgctctacaacgttattgcggtgacattattacatcactaggtgataggagtttttcaactctgttataatcttatgagaagtgttgtatacgtagtcagtcgtccaccaaaatgtgttataatagtaagataccatttggatattctagcaacaacaaaagcattacatagaaacatatgttgaggccaggtggggtggctcatgcctataatcccagcacttcgggaggccgacgtgggtggatcacctaaggtcaggagttcaagaccagcctggccaacatggtgaaactgcatctctactaaaaatacaaaaattaggtgggcatggtggcatgtgcctgtaatcccagctactcgggaggctgaggcaggagaatcacttgagcccgggacgcagaggttgcagtgagctgagatcgagcaactgtactccagcctgggcaatagagctagaccctgtttcaaaaaacaaaaacaaaaacaaatgtattctatgactataaatgtattgatgtttatttacaagaatgactcactgacaagtccagaaacacaaacttataacattgtaaaagttaaaagcaagattgactgataagatctttaccgcttctcttttatgcactcctctcttgctttccaggaatgtttatgtaaacctttgatgtcagcgtttcctgtctttcttttgatttggtttcaatatattcctttaagccagtaacatcattatgttgattgttaaggtttaatattcccctttacattgttttaacatctttgtcagaaatcaattgaccatatatgtgtgaatctatttctggattctattttgttccattgcctatgtgtagtctatatgtctgtcttcaccagtaccaagttgtttagcttaaatagctttatagatataggtaggataaatcctccagttttatctttcttttaaaaaattgctttggttattctggattctttgcatttgcttccataggaattttagaatcaggttgtcaatttctacaaaacagtttgctagaattttcattgagattgggttgaatctataaatgaacttggtgaaaactgacatcttaataatactgagtcttgtaatttatgaacatggttgatattttcattaagttttccaaataaaagggggaatcagcatttataagcacatcacatatgcctcatatagtaatgggtgctttacatgtatcatattaattaaaaatcaccattccttttattagctagattgtgttagggacaagctaccccaaaaaagcttcttggtactgccaacacccccgccccccacccccgcaaacctctccgtaccacccctcctcttcccccaaacctttttacatttctaagcccctatctaggcaccgcggtgaagccaggagacttttacctatcaggtcttgctgctataaagcaaacccaattacaaaccatccggactgcacagtgggaggtcgtgggaagtataaacaaactttacctacaccctccggtaccataaacgtcacaaggtgatatgtggcagagttaaccaacaaacaactccagggtctctctcccccacataaaaccctcattttgtaagctcagggctgcctcctctgtctgtaatggagcagccggcaggttgaataaaggcttgcctgaacttgggtctcggtctctctcggtctctctctccctctctctctctctctctcgtcctttctctcggctaacttcacagattgcacataaaaaagaaaaggggttcagagaaggtaagtaactccctagagaccaataagtggcacagaagggaatttgggccctcatctgtctgactccaaaacctggctttatctattcaccggtccttataactcagctaaaacgagggttaagcaagtgccatcatttatgactgtgaacctcttcaaagttcagattgttcctgaacaatcaagcatttcaaactcttaccatcaagtaaggagatagcgttacatcgtgtgtaggcatatggggattaaagattacattatattttccaaattgcacttgagaattgactgtgccaattatatcctttctgggtatctaccttgttcacagtatgtgggatccaggttgaggaacagcataaaattcttgtaccctgttgcaaaaatttattagtaatccatgcatactggtttaggatttgaaaacaggttttataaaaggtttgctaggtatcgatctaatttcaggaataccctagtagggaaattcagtgacctttacaaatttacccgtggccaaaaaaaaaaaaataagtaaaaattaaaaatcagaacacatccaaagtaattataattaaaattaaccaaagttcctgatccaatcctgataaggggtattaggtttaatatttacagataatttatgaagaaaaagattacggttcaaagtctacttcaggtatttctatttacatttcttggaaaagtttcccagggctctttctgccccagccgccaatctacagaagagtctagtcgactgtccactcatttcacagcacttgtctgaaactagaagacccagggagggaacaaggttcaggcttgaaacgctaagacattcaagatttcaccttgtatgcaaaaatcagaatgggaggctgcagcggggcctcacactcaccggagctaggcgctatagatcccgcacccgcggagcccggcaaccacctgaggggccttggccaggagggggtggccccccggcgccggcggcagctccggagcaaacctggcaaacccgagcagggcggtgcgggttgctcagggagaaaatgaagggagtgatagggtgggggtggcagggaacgggcacaacgccggcttcctccggacggcctcctgcgtcccacctgtgctcctgaaaagcggcccccgacagggcgcggcgggaacccgagccgggagtagggtcacgagttaaagcggcgggggcgggaggatgcgcgggcggcggacggggcgctctcctcccgtctgactctgggcggagcggggctcgaggctgctggagtcgctcgctgactcgccctgcgccctcgccgcggacaccggagctgcggccgctccccgctgtcccccaggtgagcccgcggggcgctgccccggggcgtcgggtgtcgcgggaacggcgcccgcggcgcacagggagggccggggaggccgggaggcagcgagctgtcggggacgccgcgggaaggccgggccgggcagtcggcgccatggagggcaggcgggctggagctgggcgcgagatgcagctgttccgcgccgcccccaagccgcccgcaggtcagtggaggagcgcgcctgccgggcctgcccggggctgggcgggtgggggtgctctgctcctcggtccccctccaagccgccgcccacctgtggccagggctcagagggctggaagccacccccgcccggagcccctgggctggaaggcttggatgccggccggggctccagatggccttgacgcggctcggctggcccctttcaaggcggactgtccccctgttagaggtgggggcggctggaagtgggggctcaggcccgggtcgctgcgctggctgaaagcagccgccagccgggctgcggccgtctgagctccacggcagtgcccggggatggcagcgaccgctctgggacatcgctgcaaccctgcagatctttctcgcacacactacccaacaaaagtgtcaacccttgttgtttgtttgtttgaaaaaaaaagaagactggagagactaaagttttgtgtctggtgaagtgggaaagcgcttctgaaaaaacgaggttgcataactttgtcgccaactgggaggcctttgctatttatacactcccgggctttctccaattttctacagcttactccaatcaagcctctgcccgccaggaacaggtaacctgtgtgtgtccgtttgctccttctaagagcatgcctgatagatacttcggtagcctctccggatggccccttcgtcgggtagcctctcctgatggggtccttcgcccaccctgcctcccgcgccggcgctccgggtgaatgtcaagggtggctggctgcgaatacctccttcagctgctggggttcccgacagtttgcagtttttaaaagtgcaccctcggaagggcttttcagactgggtaaacctgacttttccaaggtcagcatctggtcctggtgaatgaaatgtctaccgggacaactcgttgtgatgtgctgaatatatgctggttggcttgttttctctttgttcctgtggattactgtacatggtgtgtggctagtttgtttaaaatttaattttccctgtatcaaagtggaaagcgcttagtgtcaatatacaactcaccaacatgcttattaacagcttcatcattatgttggtgttcatatgcgagctttggtcaacatgaaatcatctgcgttttaagtcctatagataaagtctccttaaatgctggttaaaatatcctgcctttttgaaggaagtaaaactgttaagtgaaaatcctaatttattaataactttttctttcctttatgcctttacctaagaattactgcatttatgctttgacaggcattttaacacgcacacaggagccacactttaatgagttatataataattatttcattttgaaggtactgcatttgccatacagtaaatatgttttatggtttattcatccagcagtatccttattaatcttttcattaacaagagtttaagaaccttccccatgctattctttatagccagtatctattgttcggagatgttgggcttcctaagaatgcttgaattggaatcaaaagtggggttctagacttggaaagcagcatggtatctaaccagtgacttgtaagatattgtatgaatgcaggttacaattttccttcttcattgctgagtacaagttattattaaaatgtcaaataaagcctgcctttctattccgtatggaaggacgctactcattgtttggggtattttactttgaacaggtttccatagtataatatcaatcttagtctgagggaaaatccaagatccatcccagtctctagagtgacttctccgtcactttgaaaaaactgattctgaagacaataaaaccagcccgacccaacccttttcaaacgtacctgcccccccccaaatagatatgaagtactttgaaaatatgctataaatataaggccttcaataaaaagtcattacaagcgatgccacagactgggaattaggcttaaattgagggcccattttcccctttgtacaacagttatgtttcctgaggctcatactgccccttaagaaccttactggctttctaggaagccaccctgtctgctgtgggtgttaggtaggtgagtctgcttagcgctagaccctatgcaaaggctttgtttactgttttatttaatgctctctacactcataactatttaattctggctacaatcatagaagggtaggtgtagttattcccattttgctggagaggaaactgaggctcagaagggctaagtgatttccctgagattgcagaaacgtcaagtcatggaaccaggattagaaaccaaactgaatcttgttctttacactacaccctgctatctttaactcggtggttttaaacattttttgataatctgtgaaagttttagttacctcccaggaaaaagtgtccacagccacatatatgaaagttttcatataacttcaaggcccacctaccctctgaagtccttcccccaggtcctcaggtctctgatcctctaactatactgagtgaggcagaaaacatatacatcctatatatatgtacatataatcttttactaatgggagcagcccttgaatttggtaactttgaactaggtgaaaattcactttgtaattaaaacaaataaaaaagtgacgtcctacattggaactgattctgtaaacatctaaaatgcagtttagagcaatggtgcttatttgaaaccaggacttctgtatgggcttctccttgcaatattaaagaatatggacttgtgtctttactcactaaatggaaatgttggttgttgttgttgttgtttttttcctctagagatggcagatcctgaggtagttgtgagtagctgcagctctcatgaagaggaaaatcgctgcaattttaaccagcaaacatctccatctgaggagcttctattagaagaccagatgaggcgaaaactcaaattttttttcatgaatccctgtgagaagttctgggctcgaggtagaaaaccatggaaacttgccatacaaattctaaaaattgcaatggtgactatccaggtaagcatctcagatcatgagtttggtgaaagcctcttttaattacaaagataactatggacagtggttttttttttaaataacttttaactatatgcaaaatgttgaagagtaacagataagaaaacatacaatcttagacccttctgtcttcaacatttgtgaaagagtttgtcttcttttttcttagtttttttcttgtatcgttcgctaagttataattttagtcacataatctaattaattttcaggaaaagaaaactaatatttggcttccaatgaagaggttcagctggtttctaaataagccatggaaactagtgttgtccaacattaggactttcttttccttcctagttagtttcctgggaatttctctcttcagaaacttaaagggttcctgctacaggcaaattcttagattctcacaaccctgtgatcatgagaaccatgcaatggaagaatgtgaagttaactaacagaagaggagtggcaggagctagtgaaacacaggacctctttttagttcaaagggagcttttaaatcacatttccttggctgcttttaatatttttttgggggaaagggggaaccatattttgtgattcttaatatatactggttgtgatttattcttatgaaaatatgttttcctgttggtcaaattatctcttgctaaaagcaaagggcaaaatagaagcagattttagtgagaaaaatagatgtgataggtttatttttattattacttactcttcctaagttggtgaaaaatgcctaagtaaataaacaattggtattgaaggagagattaaaaaaaacaggatattactaattttaactgcttattgagaacaaacacttatgattgttagggaaccaaggcaatttttacaatcatatgaagttggtagaattcttgcttgtttctaatgctaggtgttgtatcaagggaaacaaacatttagtgactaccctgttccagtacattatttcatttaattctaacattcttactggctcattttacagaagaggaaactgatgtttgtagagctcttttaaagtcacatggcttggccaggcagggtggctcatgcctgtaattccagcactttgggatgctgaggtgggtggattgcttgagctcaagagttccagaccagcctgggtaacatggtgaaaacctgtttctgtaaaacatacaaaaataagccaggtgtggtgatcacaccactgcactccagcctgggtgacagagcgacaccttgtctcaaaaaaaaaaaaaaagtcacatggctagtcagtggcaatatcaagactttgaaggcaggcattctctctattatattaccctgaaaatggatgttcagttctcagccaaatacttggcaagttgaaattgaaattcttaacttctgagtgataatatggtgtgtctcaatagtgaaaagtttagtttcttataaaggagaaaagcctgtatcaattgaacatgaatattttctacttagaataataataggtaccacttgagtgtttgctgtataccaggctaaacattttatagatgtcatcatgttcaattctttttttttttttgagatggagtcccactctgtcacccaggctagagtacagtggcgccatctcagctcactgcaacctccgcctcccgggttcaagcgattctcctgcctcagcctcctcagtagctgggattacaggcacacaccaccatgcccggctaatttttgtattttcagtggagatggggtttcaccatgttggccaggctgctcttgaacttctgacctcaggtgatccatccacctaggcctcccaaagtgctgggattacaggcgtgagctacagtgcccggcccatactcaattcttaaaacaagttggagggtaggtagtggtatcctcatttcacagaggagaacaatgagggtcttggtaaggaaaaggaccctgtcatagtcaggaaactagaagagtagaactgatattcaaactcagatttattttctctaagatttatgttcgtaattacttcttaatttttagggagctcatctaccttcctatgtttactaaggtggtcaagggaaaactgaacaatggtttaagatattaaggctgctagtaataagcatgtaaaaggtgtttaggtaagtttttaaaaggaactgagggtttcttaattgtgatgtttccttaatttatatcagagcaatcaaacaaatattagataaagacagctttgtaattgagcaaatgaagtgagcaaatggtgacagattatctcagggaaaatgaggtggtccttctgttaaactggagattttgtgtctgcagcagcaaaagaaagatgtttacaatgatagacaccctactaaaaatttctcttttcccactacctggcttactctctgaattacagcagttttctctcagccattgttattcctgtctgccactaaacctttgagggcagggaccaattgtcttctcattgtatcctcagtccctagctcactgctgacacaggagaggtactcatgtatttgaatgactggtaagaatatctttgggaattctttggggctgtttggtcatcagcttcaacagatgcaaaatccctagaatatcaagatgtcatcttattgaggacaattaaagaagctctgcagaaaagagagttaggtgcagagtgatgatatgtgtggggtgcagaccatatatcatatgtggaagggagaggggaaaagatttgtctgctgtattttttctgatcaaaccctggattactttgtgtagcatgacagggtggatagaacctagatttagtgtgtcagacatgggtttcagttttcactgtatcaacactggctagtgatgtgacttgaaaaaactatgtaacttctctgagcctcatctctaaaattggtgtattaggaatacaccgcaggattagtatgaggaaagttcctggaatagtgtatggcacataggtgctcaacattgttcccgccttccatataaaatatactctgcctcactctgggatttaagtaagggtgtagtttctcaatttacagcatgtacagcatgtggtgtgtgtgtgtgtgtgtgcctgtgtgtgctgtgtgtgcatttgtgtgtgtgagagagagagagaggtttggatgagagggaagagaagacaaaagagagacttaagagtatggtaagctttttttttttttttttttttgagacgtagtttcgctcttattgcccaggctggagtacaatggcacaatctcagctcatagcaacctctgcctcccgggttcaagcaattctcctgcctcagcctcctgagtagctgggattacaggcatgcgccaccatgcctggctaacttttttatttgtagtagagatggggtttcaccatgttggtcaggctggtctcaaactcctgacctaaggtaatccacctgccttggcctcccaaagtgctgggattacaggcgtgaaccaccacgcccggctgtatagtaagcttttaggtataattgaaaggccttaggttaatatgacaacagtgcagtgaaaccttttgtgtgtgtcaacaactgagtttcacgtaaaatgctgaggtcaatcctgcgtgactattaaggacacattatgttaatatactttaatttaaacatgagttgaaagggtattttctatttttggtcttactgtcatggttttggtgattagacctaggaatatagtttggtcataggacttggactttcttaatttattatccacctgctgcaaaaccttcttgatgtcccagagaattcattttaaactcttctatttgttgttcaagcccctgtaccttctgctctgctttttctgcccacattttccaccctcttaccttttcttttttttcttttaagctggtcttatttgggctaagtaaccagatggtggtagctttcaaggaagagaatactatagcattcaaacaccttttcctaaaaggatatatggaccgaatggatgacacatatgcagtgtacacacaaagtgacgtgtatgatcagttaatcttcgcagtaaaccaggtaaatcaagtgtgtgcattatttacttgggaaaaagaacagactggaaaaatggtggcaatgtacataatagaaactgacattcaagtggagaagggtgaacatttctgcttggaaatgacacatacaaaattatttttaattttttaaaaatattgtcaacaaatttttataaaaccagaagttgagaaaagcttttgtttagtaacagaaaggcagaaactttgaagatttaattaaaagaatcagagttagggcttggcatgggagtctcaaagattgaaattactaactatgaccctgggtataagtagtcattaagtcctcagagctgaaagtatactttcagggcctcttaacaaataatgagaatattaacttttcatagtttgtacagcaaccaagacctaaaaattcacttgaaagtaaggcctttatgtcatacatgacaatgattttattgtgacattgactaactgccaaacaaaaaacaagcttgtttttcatatagatgaatgctgtattttattctgagtttgtaatatatatttttgccagaaataatatatttttctcaagaccccaaatttttaaatctctaggtgtcattgaaagcgtccttgaagtcagcattcccagactgggttagtttgaaggacacatttcaaaattattacaatttttcttcagaaaattattatcgtataatcatggctattcattttctagagacagtctatgcacagtaagatgtaaactgctaggataaaatacatatttatggcatgaagtctttctgttagcactggggttgggaaaatgagccagaaatctaaagtaatagaaataagttacataaactgttcaacagaactatgtcctacagcttgtagggggaagaaggcataatgatggagatactccgtttttagaattttaagtatattacgtttctctaaagctagtctgatctaaactggtagtttggtgtttttcgaggggtggcggggagtgggatagaggcaagaggtaaacagttcattaaatttttttttttttgagacaggatctcactctgtcacccaggctgcagtgcagtggtgcagtcacagctctctgcagactcaacctcctgggcacaagtgatcttcccaccttagcctcccaagcagctggggccacaggcatgcaccaccatgcttggctaattaaaaaaaaattttttttatagagacagggtctccctatgttgcccaggttgctcaaactcctggcctcaagtgatcctcccatctcagcctcccaaagtgcattaaattccttataaatcatcttaacctttattcgtagacctagactcagtcttcaaaatgtagtatttggcacttaggccattctgctttttcagatttccacattccttctggaaatgcaggtacctgctttattctagttgtcttggtctgttccttctgctgcaacaaaatacctgagactagataacagacaaacaacagaaatttctgcctaataattccggagccggggaagtccaagatcacttaccttaccactggtaatggcttgcaccttcttgctgtattcttacatgatggaaggcagaaggacaaaatggcctggctaatttctcccagccttttataaggccagtagtcctattcatgattgttgacctcctaaagactccacctcttaagactatcatattggggtttaatttccaccataagaactttggagggacacatacattccatgtatgactccctactgttgattccctactgttttctaagatgatttactgtttttctaagcaccagtaggtacttttagctgaagataaaaagtgtcttgatcaaaatttttatgaataagtagggttttgagtgttaatgaggtctaatgaggtcagttctctttcaggcttctgagaaatgaatagaaaaaatgtgagttaatattttttattttttattttattttttatttttgagacagggtctcaccatgtcacccaggctgaagtgcagtggcgcaatcttggctcactgcaacctctgcctcctgcgctcaagcaattctcccatctcagcctcctgagtagctgggattacaggctcccgtcactacccccagctaatttttttttgtatttttagtagaagcagggtttcgccatattagccagactggtcttgaactcctgacctcaagtgatctgcccgccttggcctcccaaagtgctggaattacaggtgtgagccactgcacctggccaaaatgtaaattgttattaaaacaggaaggatctttgttttctgtgaagaaagcatttctttacttaatagttgaggtgattgttactgagaggaactgacaaatagggcagtggcatctcagttcttagaagcatatccatgactattagttatccccaagggtttagccccaagatgtcatcctactggataatctccagggctcattctgatccaatactgtgattataacagcactactgtttattatatatgtttctatatttgaatgtgagagaccttattttctttttaggctgtctcctggctttcctcttatttctttaataatttttgggtcagctttattggctccttttctttcatctgcctcttaaatttgagcagtcctcaaagcttggtcgttttcctacagaaatgtcctccactacccagcctcagccatcagtatgatgaagggactcctaagcagttgcccacactgccagacacctacctcacaagcacctcagaactgcccatccaagagcagcttcatattctcctcccacccactccctaggctgtttcttccttctggtcttctggcttaggttgaaaggcctcagggtcttccgggaatcatttattcttgcagctcaaacatagtttataaattcctgtttctggatggcttcctttctttcctacccaccctgccctaccacctcttgcttttggtgccacagcatttagctaaggacatttaatgtgtttttatattaccactcaaaggctgacctgggacccatgaatctgactgaaaactccttctctcaaggcagagctgcagagaccaggagggacggatgcccagactaattaaagctcctccaaggcctcagccacttggctgctctgtgccgtctcaccattgttagttccaccagttagttccaaccatcatctcataccacatttctgtcccgtaaccctctgtcttgggctctagagctgccctctagctggacacagccctgctgcttccctagattacccagttcttgccagatgctcagacctgcacaaagagccatatgaagagctcaaggaagtctggctatagcgtatatagttaatgtatatattatataacgtaactatgtggtgtatgtaggtataatgtgaacaggtacctgcagccgtgggtctcagatctttcacagttcaagaacttaaaaggtttaagacacaagattctgtggtcaggaggttcagacctttaggtgattcttgtggggactgccccacaattacacctggactctgggagagttgtaggccccatcacagctatgactgtgcgtcgtgacccctgcttgcctttcccagtttacctcccattacacatcatatgttctaggcacactggtctactgggtaccttaaatggaaaacaaaaatctcaaaactgagtatctccagcattattctactttatccctatatgccaagcataatgttgtttactagcttaggaagcttgcttctgttaccatagatttctggctcactttcccaatcctaatgctaacagaaagcttggtgccataatcacctatcttatcctaacagtttaccaactcactgtgcacagattagctctagtaatgaagagctccatcgcattattataatttttcacctcaccattaatctgacaaatatttgagcacctactgtgtgcctgcagggctggtgttagagcagtgaattgataaattccctgtcctgtggaacttgcattctaatgggggagatagattttaaacaagtttaactaaaatcttttggtttagggtaatgataagtgctatgaagaaaaataaactagcataaggcaataacagtagtctcggagtggtcagaaaatgcctttctgaagacttgaaatcttggggagaatatttcaagctgaaggcgtggcaacagaaggccctgaagctggaaagcgtttggtatgtttgagaaaatgcgagggaggcaagtatgagggggcagagttagggccaggggagctgggggccaggtctctcaggacatggaaaggagccttgaatgttattctgagagagacaggaagccatggaagggcttttgataggggagagacaatgataatatacataagcaaaatctaacatgtattcactcaaatatttattaaatagtatctattggttgggtacggtggctcatgcctgtaatcccagcactttgggaggttgaggtgggcagatcacgaggtcaggagatcgagaacttcctggctaacatggtgaaaccctgtctctacttctacaaaaaaattagccgggtgtggtagcatgagcctgtactcccagctactcaggaggctgaggcaggagaattgcttgaacccaggaggcagaggttgcagtgagccgagatcatgccactgcactccagcctgggtgacagagcgagactccctctcaaaaacaaaaacaaacaaaaatagtatctattatgtatcaggcactttttgtgtgtgcaagggtactgcagtgaacaaataaagtcaaggaggtcatattctcattggaagagccaggtagtaaataagtatagaagagcatcatctgtcagtttgttataagtactgtgaaatacaaaacaaagccagcaaagtgaatagctggaggtggttggagaaggtctctctgacaaggtgacatgtaagcagacagcagactaaagagagagcatgcagcctgtgtctatctcaaggaagaaccttccagataggaagaacagtaaaaacaagagtcttgagcaggtgtattttggatatcactgttctaagagctgtacatgcatgaattcattcactctttatagcaatcctatgagttctagatggagactagactaaggtgagagggaggattggagaggcagaggcttaattttttaggggagagaggatggtggtttggactgaggccatatcagtgaaggtgatgagagacagtcctatttgtggtgaagaggctcagatttttaagtgattcttttgcagagataatttgaaagtcatgcatgactttcagatggactggaagtggagtataagaggaattgacaaaaggatctttcctaagttttggcctgaacaactgactgacttacagaataatttattgagaagggaattactatggaagaagcaggtgtttctgtttgcccatttactagagattcctcttagacaccataggcatcatgtaggcagattgtcatccatgtgtggtattcagtggaaaggtcagagctggagatgcaaatttggaagctgtcagcatagaggtggtatttgaaatatgggactggttgaagtcagctgtggagagaatgtggatagaggtcaaggcctgaacccaaagataggccaaaatatagaggttggcagtgggaggatttcagcaaaggagaccaagaagaaacaatcagtgtcccagaagtcaagtaaagaaagtattccgtgtaggaggagcattcaactgcatcaaataccatggagatgtcaagttataggaggactgagaactaggcatcagatttggtaatacactgctcattagtgaccttgacaaggtccaactcaaaatccatcccatattagaaattattttattcatttgtcatagcatgcttcactcatatcttttagcagaattattttctatgtgtcgatcacacaaagttgttcatttcaagagtgacagaatgaccaactgtaccagacatattgctccaaaaacactttgttttggaaacatgtctgcagacatccattaagaatttaagatgacagttattccaaggcaccgtaagattcttacttgtaaaagtaatttttttaaatgtagaggacccactaggataggcaatattggtataaaggtgattaaattataatcttgcaaagataaaggttaaaccaatactttctttaaaaaaggttttgctggctagcctataataattgtatcccacttcttatactacagtgttaaagtagaactctgaccttacaggagatagtttaaagataaatatgtatttacattgaatatcacctgaattaaacataattctttaagggaggaaagaaatgcaaagagtatgtggcttcagactttaattttacagatcaggaactagaaggtcagaaagtttgtcacagaaatgaggcttgaatctagaactctaatttgtgagtgccctttgccttcctagtgcacagcagcaagtcacttaccctgtttatcaaagtgaatgtctctatcccaagggaacctgccaggatcagaggtggggagggaggggagttatggcttcactcctgccctggctggcattcccattttctgtttctcattttggttgaagtacttgcagctatacaatgtctccgttgggaatcatgcttatgagaacaaaggtaccaagcaatctgctatggcaatctgtcagcacttctacaagcgaggaaacatctaccctggaaatgatacctttgacatcgatccagaaattgaaactggtgatgttcttctataacctagaacctcaatttttaacacctcaatttatatttaaaattagtaatttcatctttgaaaacattgatttggtctgtgatattaggacatagtaagaatgatatacgagttattatgtgtcaggtactgttctgagccctttactataactcaagaatcctcaaggaaacccagcaagtcaaggattattattatccccttttatagaagactaaattatggctcagagagttaaatgatctgccaaagatggagctagaagaggcagtgctgaaattgggctcaggctgtttgtgttcttagctatcgtattccaccatctcttgtgcaggatatgccagtgaagtattaatagatagatataatgtttgtaaaacattatgcttgcaaactcttggtatatataaaactctcctgccccaataccacttcactatcatgcatctttgggggtagattgaaggggaggaatgaaaatcagaacatggaatagcatggcgtattcttcttagcaaagttctatttgcaattatgcctaaaatattagcttaggtcattgagttaaaaaataagtattgaaatacttttaacaacagccactaggatttttttttctagagataatactgataacagtactgaaagggaaaactttctaaaatgctgtcttccttttttggtgtgtgtgtgggatgtctattgaagaaacattgttagtgcataatattttaaaaatagatccctcaaactgcttagaaaatattactgtaattactgcaagtgcttcaaatcctatgcttaggatacaaaaagggggagggactcaaagtttatctaggcttaaaaacgaagacagcatttatataacattaatgaaatagagttcagatctttgtctagcctccatccactccagaaatgtagccacttaggtcttaaaaacacatgagtcacggtaaccatgtggtatcaatgtttatttagcttttaaaattttaattcagaaaaataatagaatctgaaaaataatagaatctgaataactggtcttaaatgtatcagcctttcaaaatgcagtcttatttaagtactgtatcatgtttttgttcctttctatggcagagtgtttctttgtggagccagatgaaccttttcacattgggacaccagcagaaaataaactgaacttaacactggacttccacaggtgaggggagcagacaggagtgtaacttacgtttgcacgtatatattgccacagaactaaaatcacctctgttttctagactcctaacagtggagcttcagtttaaactgaaagccattaatctgcagacagttcgtcatcaagaactccctgactgttatgactttactctgactgtaagtgtgggccaggctgaatttggttccagtctggagaaaaattgttttatctggtaatgtttcatatccttggattacggtgtgataaaaaaatataggatgttttcacttgaatgtgcataagggaagcattgatacatctagctctattttgctataataacaagtttacttgttagttatgtcttctacacctctgtataagttctagaaaagcagggaccttgttttgttcactactatttccagtaccacgaacagtgcctggtatagattttcaaacccaaaaggaataggtgtttttaggttctgtgtggttggctctcagcaatctatggctggctgtcagctaaaggttactgccaagggttcttgttacttagtgtcttcaccatggatgtttccatgtttggggtttgtagtatacatctttaacttattacagtctaccttcaagttataccactgcacacagtgtaagaaccttacgacaatgtacttccatttctcccatcttggccctcatgctattgtggccatataatgtatttctacatgtgttataaacccacaatatatgttattaatctctctctctctctctctcttctttttttgagacagagtctcgctctgtcacctaggctggagtgcagtggcgcgatctcggctcactgcaagctccgcctcccgggttcacgccattctcctgcctcagcctcctgagtagctgggaccacaggcgtccgccaccatgcccggctaattttttgtatttttttttagcagagacggggtttcaccgcgttagccaggatggtctcgatcttctgacttcgtgatccacctgcctcagcctcccgaagtgctgggattacaggcgtgagccaccgtgcccagcctattttttctttaaacagtcaattatcttttaaagtgatttaaataataataaaaacatttttttatttgcccatgtagctaccatttccagtgtgcttcattctgtgtgtagctcccagtttgtatctggtattattttccttctgcctgaagggcttcctgcaacatttcttacagtgcaggtctgcactttcagcttttgtatgtttaaaaaagtattttgccttcctttttaaagttcttattagcatcttttaaataaaaattttacgaatacgtatttatggggtacaggtgatattttgatgccagcattcagtgtgtaatgatgaaataagggtaattgggacaacattcaccacctcaaatatttaccacttttttatgttgagaatattctaaatctactcctctatttatattgaaatataaaataaattattaactatagttgccatattgtgctactaaacactagatcttatttctcccatctcactgtatttttttttttttttttgagatggattctcgctccattgccaggctggagtgcagtggtgtgatcttggctcactgcaacctctgcctcccgggttcaagcgattctcctgcctcagcctccggagtagctgggactacaggcacacgttaccacgcccagctagtttttgtatttttagtagagatggggtttcaccatgttggccaggatggtcttgatctcttgacctcgtgatccacccacctcggcctcccaaagtgctggaattacaggcatgagccaccgtgcccggccctcactgtatctctatacctattaacgaactcttatttatcccccacgcctccccaataccctttctagcctctggtaaccattattctattccaagccttcctttgctaaaggtagtttccttggctatagaattgtaggttgactgtttttttctttagcactttaaagatgttgcttctagcttgcattatttctaatgagaaatctgctgtcatctttatctttgttcttatctatgggatgttatttcccatctgttggcttttaaatttttcctttatctcttactttaaaacaatttgattgtgaaatgctttgatggtgttttcttaatgtttcctgtgtttaaggttcattgagcatcttggatctgtaggtttatagttgtcattatatttgatatttattcagcatgattttcttaaaatatatttgtcacttccccccaccttttcagagattcagagacaaaaacgtctgtatttggttacttggagttgtcccatagttcagtaatgatctgtttgttttatgtctcagtttttttcagtgtgtttcattttggatattttctgttgctatattttcaaattcactgttttttcttctgtgctatctaatgttttctaatcccatccattatttttcttctttctttgggattcagtttactgagatgtgattgacattaagtcccagttttttactcaatagatatttagtgagcacctattatttgtacaagttggaggccctttgtgtaggaaaagcatggcttctccgtagcaaggatttctgactcaatcaagtaacactgagcgtcctccttgcacgaggccataggctgggtcttgcagccgttagggatatgggcagacactgactgtgccctcagttgcttgtcaaagaaagaagcttacaatccctcatgaggagaaatacagtggttgaacttttaaaagtcatttgaaatcttatatttgaagtgtttctgattaccccatatggagaagcttcaatacaatttatttaaatgacaaagttttcaaagaactttttttcttcaggacttgagagaaagagaagaggcagaaatgaaacggattgattttcttgccttgccttccctgtccttgcataaggaagacagtaggaaaactatggaaggtgttctggcctagctttgtcctgcttggcccctggtgtcctgaagtggttattcttgaagcaagatgtgactgttgactccctgtcaccaaaccctttataatacatgtagtgccaacgtgactaagaaatctaggcccagaataaaaatcaaaaaagctccacttgaaatgtctcaaagcagaaataatgagcctttgtattagtaagaattatagcagcactaaaaatctacccctaactgaggtcctgccggaatttgggagaaagcacagttgtaccagttcttgctcacatgaagaaggtatctggaggtacttagaacagagagcaagaggaagtgctcttgttatataagttctttggagtggaaatgctgccctagacatataatgttttagagactacagggtctctgtagaagatctagttcatcgttctcatttcacagagaaatgaagagaacttcccatggttgaacagaattagcaacagatcagagttgagaatctgggtctcctgtccccttgaaagaattgtttcctaattaatgtgtagaggtttcttggctccaaaactataagtatgtttttgactgttttcctgtcttcacagataacatttgacaacaaggcccatagtggaagaattaaaataagtttagataatgacatttccatcagagaatgtaaagactggcatgtatctggatcaagtaagtgatgcgcattactagttttcagaatggttattaaataatgtaaaatggttattaaaatagcaccctctggatatctagaacaacaaatagaagattagaccattttcaagtccctaaacctctacaagtagatcaactctgatgtttcaggcaatatgtgagtcatgaataactgaaatggccttcctctccttgtgccctcacttgcccactcctgaccaagaatgtactcacagtcccccgccaccaaaaccctacatacatcttcccagaccaacacttaccgagtgcatgctgtgtacctacttccaccttagttttcttcattttaatatttttaaatgcccttaagatagggagaatccttatttttacagatgaagaaactaaggctcagaagccaggggcaagtcaggtaggatgtgaccctgcagcatcccacatattatgattgtcttcagtccatttaaaagtgtactgaaagaggaaaggatctactcttagaaatatggacaaaaattcaggtgtagaccaaatactgtcaagaattttggagctgaactggagagaattgcctggaaagaatttatctaattttctagtctctcataagtgacataatggtacatcgtactggacttaatggtcgctagatgaggagttctcagattctaatcagcagaagaatcatcctgggtacctgctatgatgcagtttccccagctctatgcaagccagtaggtctggggtggggcctagaaatgtgtaaatagtccttactcagactatacttggataatcacagttctaaagtttcttactaattgatttgccaagttcagacgtaataatgagatagagtaaataaaatgaaattttgccatgatagtatttttttcactaataggtaacttcaaatatatgaggctcttgagtcacatttgaaacataagcctgttttgtcatctgtatactttataatcattctccacaaacaccagaatgaggaaaatgagagcatacacaagtgtctggcacctaggcattctctcaaatgtttgtttcttaatttgtaagtttctctaaagtcaatttagacatttatgtagtaattatgctccttggcagatactaatgggatgcttcatcacagagctagttttaagtactttcttttttttgtcagcagagagcagtctaacttgttaaatagagacaagctctgtggcagtgtacaatggctgacacctctgcccacctctctccattggctccacgcatggtggccaggacttcgcactttcgattctccaaaatctccataagggtggctctttcttatcactcaggtttcagctaaaaccccctgctccctcagtgaggccttcctttactatgcaatataaatcaacctctctgcttccacattgcccgacactaacctccctcatatagagcagtaggtctcaaactttagcatcacctggagggcttgcagaaacccagtttctgattcagtgggtctggagtaggacctgagaatgtgcatctctaacaagctcccaaaaaatgccaagaaccactgacatagagtgatggacactggaaacaaactgcacagattttcccccagctctttcactgactagccctgcaactgtggggaaatcatgtgacctctctgtgcttcaggtttctcgcctgcaaagtggggataatcatgcttacctcattggagttgctgtgaagatcaaataggttaacacatataaagtgtttagagctatgtttggcaagaaatgtgctcaatacatgttagctattgtgatttatcttctttctattacttactcctatctgaaagtattttgttatgtgtttgtttacttctttgtagtagaatagaagttccacagatcaagggccttgtctatcttgttcaccactgtatcctaacatctagaaaaatgcctgacacatagtgaatgcataataaatattttatacctagataagtacattttaatagaatatgcagggagatgggcctgggcatggtggctcatgtctgtaatctcagcactttgggaggctgaggtgagaggatcacttgagaccaggagttcaagaccaaccatggcaacaaagtgaaaccctgtctctacaaaaaaattaaaaattagcccggtatggtggcatacctatagttccagctacgagggaggctgaggaaaaaaaaaaagaatatgcagggaggtaattgtattaagaacaaaagactacaggcttataattaaagatcttggaatgatagttgtggtgatttttcttttttttttttttgagatggagtctcgctctgtcacccagcctggagtacagtggcatgatcttggctcactgcaaactccaccttccaggtccacgccattctgctgcctcagcctcccaagtagctgggactacaggcgctcaccaccatgcccggctaatttttttgtatttttagtagagacagggtttcaccgcattggccaggatggtcttgatctcctgaccttgtgatccgcctgcctcggcctcccaaagtgctgggattacaggcatgagccaccacacccagcctcagttgtggtgattttttaaaagaaagacttttgcccttcttcaaatactaattggaagaccgtttatcagggcttctttgttgtcttaccagaaagaatgcttgaattatttaaatgattctaaaaagaagatgtcaccatattaatgtcccactacataagcactatgtaatcctctttgctttcagttcagaagaacactcattacatgatgatctttgatgcctttgtcattctgacttgcttggtttcattaatcctctgcattagatctgtgattagaggacttcagcttcagcaggtagggaacgttgctttctaggaatgctactgacattttgattgacagagacattcactgtgcctcccctcttttccctaaaggagtttgtcaattttttcctcctccattataagaaggaagtttctgtttctgatcaaatggaatttgtcaatggatggtacattatgattattattagtgacatattgacaatcattggatcaattctaaaaatggaaatccaagctaaggtaatttttttcctaatcatgctattgttagtgtcagatttgcactaatggtaatgtatttttccagaatgtaagaattttcagaatgaattgtttcttccaaactgtatatcaagtagacttgaaattggtaatggtaattttcttaaatctagtcaggaggtctcttaggcagagtttttcaaagtgtgatccacaaaccattgcatcagaatcattgggtgcctggtaaagtgtaccatgttagacctactgaattcagactcttcggcggggcctgtgaattcttacacacaccaaaattcatacacaaccaaggtaactaaggtaagagtttttttttttttttaatcttacaagaaatgctcgaatctttaacaaaaatgagtggggctataggggaaagtgaggtcaaggcactatggtgtgcatgcttgcatttgtttcctccgtccattcaaagtgagaatgctcccattttcttactttaccattgatgtgctacaagcttatttattttaagactaacctagcctaaaaatcaactgtccccacaaaataaaaatcacattaaaaaaactaatagtgttcagactaatcttgctcaaacttatgtttccctagtcttgatgcaactgattgagtcacctggggagttggttataaacctgggcagagaccccaaatgcaatggctcagagaagataggagcttatttctgtcttatgcaatagtcagaatgggttttacagactggtgagtagctcaacatctcacagtcattcaggcacccatgttcctcccattttgtttctctgccaccccttaaggacttgccctgactgcatgattattgccgtgttgcctcaaacaggttgcagcttatgggaagcaaaaacacggtatggtagaagctctcccatagactgatggcttggctcaagagtggccgactttatttctgtacatatcccactggatagaatttagtcaatcctaactgcagagggagccagggaacacagcccaggcatgtgcctaggaaggggagaatgggtttaggttgacacttagcagctgccactatatgtggctatagtatgtatcattggaatagatgtttaactttagggacaaataaaaaaccaaaacaaaaaaaggagtaaggggagagatttgcagcaaatctttatttttaccaacctcaactatcattaatttcagtgaaccctaaatggtatccaacaaaatatctttctagaccattcaccgtctctgcctcatagatgatcatatcatgttttcttctcttctgaaacctctaatacccttgtcctatcctcattctaagctgatgaccttacttcctatttcacaaaaataatagaaaaaaaaaacagaatttccacaaacccccacctaatttatctgcctcctgccatcagtgccaatatactgtgcttttcttctgtggatacattatttaggccactattcagggccaacccctccacctgcctactagaggccatcaccacttgtttattcaagggcacagctccaggtagttttccttctcttggggatcatcagtttccttctgtctaccaggtcattcccattagcatgtttttgccgcttttcttaagagataatatctcaaccctaattcctcccgctaacttactaccatcatttatttagtaaaatatctcaaaaaagtagttaatcttgttgtttctgattctgctcctcccctcccccacctgttttttttaagagacaggatttcactctattgcccaggctggagtgcagtggcgcgattatagctcactgcagcctcaaactcccgggctcaagcaatcctcccacctcacagccccccaaaatctcattctttcggtgtctgttccaatcaggctgccctgccactccaaggaaagtgttcttttcagtgtcctctcatgctgataagtccaataaccaactatgtaccctcatgctgacctagcagcagctttgaatactgccaagcactccctttttgttgacatgctttcaatggactatcacctggttttcctcctaagtcactggctggtcttctgactttgctggttccctcacatctcaccaacctattaaggtgataatgcttcaaggcatagtgcttggacatcttctcttttctgccactgtcttggtaatctcatcctgtcccacagcttagtatctatatgccaatgattcccaaatctatacccccacttagaattcttccctgaactccagattcgcatatccaccatttagtctatatctccacttggatgtctgcttttcctctcaaatttaacacacctaaaacagaacatctaaagcccccacctctgcagtcaaaacctgcttttcccatagcctttcaaatttcggttaatggtaactctcatcagttactcaagccaaaaatcttggattcatcacagactcctctctttcactaatctcttctttcccacatctaatccaagaggaaatcctattgttctaccttcattggccaggcactgtgactcatataatcccagcacattgggaggctgaggcgggaggatggcttgagcccaggagttccagaccagcctgggaaacatagtgagaccccatctctacaaaaaattaaaaaaattagcagtcaaggtggcatgtgtctgtaatccaagctacttgggaggctaaggtgggaggatttcttgagcccaggaagtcgaggctgcattgagccacaattgtgccacggcactccagcctgggtgacagagtgagacccctgtttccaaaaaaaaaaaaaaaaaaaaaagaataaaaatcacctggtcaactccactattaccagcctggtccaagctactatctctcatttatattattgcaatagcatcctcactcctccaacaacctgctgtcaaccacagcagccaacatctgatcatatcacttctgtttgtggttctcaaatctccccaattgagttacagtaaaagacaaacttggtgagtgccaccttatctctataactgtataccctttctattgctcactccagccagatgcaatatccttgccaagcaccctcctgtctcagggcctttgcacttgccagtccctgtgcctggaaggcttctcccctagatttttgcatgacttctccctccctcccttcagatctttgctcaaatgccttctttttagtgtatgtaaaatgacaaacccatacccattccttatcccctcctctgaattttctcttcagcaattatcagcagcaagtgtcccaaagtttctattaacttatttctgttgtctctttcttccctccactagaatgtaagctttatgagagcagagacttttgtttgttcactgctttatccttagcacctaaaacagtgccttactcatagttacctcaatatttattgccaaatgaatttctgctttataatctgattatatttttccactctctcttagagtctaactagttatgatgtctgtagcatacttcttgggacttctaccatgcttgtgtggcttggagtcatccgatacctcggtttctttgcaaagtacaacgtaaggaattccacggatctccatgctgttggtatttctctcaaagttattgcactgctttggctaaaggacaaaaccattctaatggcctctcttactttcccagctcctcattttgacccttcaggcagcgctgcccaatgtcatcaggttctgctgctgtgcagctatgatttacttaggttactgcttctgtggatggatcgtgctggggccttaccatgacaaggtactgataaacaacttttttcctgttactattaagcttttagcatagtgccagtggcttgttatcctttttcaatgaactccttttattttgtgattcagccttaaaatgttgaaggtagtatatctagtgccatatttataaagtgaaagggtgtgaccagcttgagagaatatttgatgtactcaactgtctcacattctttcttgcaatatatcaggtaattaagtcccgtttaccaccagtgaagtcaagtttagtcaatttgattcatcgatatatccaaaagcagtctcttcagataagccttctcaaaatgtgacattatttaaaaagtagcatagggggaaacttgtagaaatatttgaaaattttattactagagctatagtctggaatattatgctcttatcttaaatgaaatgaactttaaaatgagatgtatgagcatgcatggttgggacctgggtatctctgcacaggcatttcaaggtctctttaaggtaaagggcagatgcaaggcttgattcaaaaaagcactgagggtgcagagcagctcctacatttgatttaggctagtttaagagaaagctgcttgtctcaggaaaaaatagtaggcttatttatgttatatgcatcacaaagcaaatgtgtgtggttacctcaggttatttgtttgaaaatggtagcttgggttatctggtccctttatgtttaatacaatgtcatgaacaaaggtctccaatgggaaggaacatggaataaagtgaacttttctcttttctttttccagtttcgttctctgaacatggtctctgagtgccttttctctctgataaatggagatgatatgtttgccacgtttgcaaaaatgcagcaaaaaagttacttagtctggctgtttagtagaatttacctctactcattcatcagcctctttatatatatgattttaagtcttttcattgcactgatcactgatacatacgaaacaattaaggtaggtttatcaagagccataagtagtagcattgtcctataacttgtagagtagcagtaaaattcagtacctaatggtagaagaaaagttgatggaatgttaatttcttcaggatagagaaaaaggaccttatttttagaaattgataaatagaactagtggaaaaattgaatgttgaaagtcttagtctctaagtagttatactttctcacacaagctttctaaccttttattagaattataagggtcattagaagtctggggggcaaagagtaaaaaactaaataaagaattataagggttagtagatattgtgtgaataaaacatatggcatttcagaaagccaaaatattgtggggaacataaaaactccaattttcataaagaaaaattgacccctttgttttgagtgtactgtaactgagcccattttctttgcaaggccctgcagggcacaagcccaggggcccagcctccagaatagcaaaaggattaatgggtccagtactagcatgtagctttatacagtcagatacctgaactgaaaagctattgtcattcatataaaatcttttaaaaatcaatttgagcctgttgaaatatggaaaggcagaataaatatccatatatgtttcaatttccataacttatactgttaggtgtatttgtggcatagacacttccacttggggacttttctttctgggtatgagagggataaagaaacatgaagccatgtgattggccctagggataaagagaacgccttggtttgaagctgataatgatgaatactttgctcatgaagccagggctgtgacttcatcctcactgaacaagatttcagggaccgaatgtcctctttgctctcatctgcttagcagatgtgtccttaggatcaccaaggcaactgggaaagaatgtagttgtaacttcagatccctccaaatggtgctctaaaagttcactgcctccaactctgcgtgcagagaactgtgtgttattcgagggtgacatctgagagctctaaggataacatgggttttcacctttgatgacataagcctgaaactcgtattttagacgctaacctctttccgtgggctcagagcacttgccaaatgggcaagctaagttacttctgatcctttctaatcatggcatgtcctagaaattttaggtcccaaaccgatataaatatgaggcccttaaacaaacttgcctggctggaagactgactccaaaagggtgtgcagattggaaaggtcccttacagcattcagacctttgtccagacacttgggccaactcgagagagtccaagactgtgctgaggtgttctgggcaaggccagggatttccatccctcggcctactagaaaaccttgttaatttagatccactgggcttcttgtggcctgaaccatgttccttcaaaaatgcctgcatcacactggtctggaagtcacaggcctgcagggcagagtagtgacagaggttctcggacttgggatggggctagctcaattctccctggaaggacgactcagacttcgactcagtgtgcccatttgggtttcagtggacccagaaagagagctcaggtaggcagctgcagaatcccaggcccactttacctccgccaaacctgagtgactctagaggctacatctcctttgcaggtactcaggagtaacgatactatctctctagaaaaccccctcccttgccaaatgatccattttgaatttggaatgaagctgttttcaaggagcttattaataaaagctttttaacattcttctgtttagcaataccaacaagatggcttcccagagactgaacttcgtacatttatatcagaatgcaaagatctacccaactctggaaaatacagattagaagatgaccctccagtatctttattctgctgttgtaaaaagtagctatcaggtttatctgtactttagaggaaaatataatgtgtagctgagttggaacactgtggatattctgagatcagatgtagtatgtttgaagactgttattttgagctaattgagacctataattcaccaataactgtttatatttttaaaagcaatatttaatgtctttgcaactttatgctgggattgtttttaaaaaaactttaatgaggaaagctattggattattattatttcttgtttattttgccatggctttagaatgtattctgtatgcctctcttttgctctgatactgttgctcctgctattctgattgtgcagactgtataattagtggaaaacaatccttggtctgactgtgactttggacaactcagtaaccctggcttggaccactctcaggagtccatccttgagagagtgggtgtagttaccatttatacagtaatcattgcattttaaaatcttctcttgaaaggaagaataagagtgcaccagaataagagcgcaccagaataagagcgcaccagctaacaatgtgatacggccatatgtcacttaaggatggagatatgttctgagaaatgtgtcattaggcgattttgtcattaaacatcatagcatgtacttccacaaacctagatggtatagcctactacacacctaggctatttggtatagcctgttggtcctggggtacaaatctgtacaacatgttactgtattgaatacagtaggcaattgtaacacaatggtaagtatctaaacatagaaaagggacagtaaaaatatggttttataatcttctgggaccaccattgtatatgcggtacatcattgaccaaaacatcgttatccagcatatgactgtatttggttatgaaagccaactgttacttgattctgcttttagttcttaagaggatcaggcttttaaatactcatttacaagttttctatcctccttcagtgttaaagtagaaagtaaaaagagtatcttatacatgcatgaaattaaagcatataccaaatgcatttttgatgaagtaattattattttattagtacttgagcagcctgttaaaactagtgatgtactatacctttcataggcacattatgtctcacagcgaagtgttttggggtgagaggctgtggttttatggggcaaggttctataactcacattaaaaatatttcggggctatgcacagtggctcatgcctgtaatacctcactttgggaggccaaggcaggaggattgcgagagcccaggagtttgagaccagcctaggcaacatagtgagactcatatctacaaaaaaaacagaaaaaactaaccgggcgtggtggtacacgcctatagtcgcagctacttgggaggctaaggcaggaggattgcttgagcccaggaagtcaacagcagtgagctgtgatcatgccactgcactctggcctgggtgacagagtgagactctgtctcaaatatgtacacacatatatatatgtgaaaataattatgcttaaaattttaagataagataaatgtgtgctgtaaaaagacataatagtctctaccccttatagactgctaattgagaattgcagggactttcaacacatgaatatttattgtgtttactatttattcaaatagaagtgaattcagttatgtgcagtaaagatcttctcaaagcaaactttttttaaaaaaactgatttttaaatttctaattttgttttactgagatttttattatttaattataatgacagtcataataatgactccaggtgttgaaatgggaggttttataacaggtataagctgtttctgaagtacctgaggctttaaaaaaaaaatctaaatatctaagtgactattttgggggcagttctaatatttataatactatcacttttagaaattactagaattctatgtgagttttgaaatcatgtttattatctgataagtccttttctttacatcttttgagatttttagactaacagtacttcaatggaaacatgaaaacactgacgcagtgttgggcctggagttttgctttgctctgaagtcattatatttcttctgtagaatcacagccaatgacttgctgccttcacatctctctcctatttctccaggctctcttattgtggcaggagtccctgataaattccaaggcttaatttttagtaatgatgtccatgagagaatagctcttctgtctactgaaagaaatagcactgactgacttttttgaactgtcctcaaaccagtacaatggcttgatctgggtaggcagataaattatgggccattttagagctctccttacatgtatatatgtatcatagagaatgtcaaggcagttgtaagaaagaacatagaatggaagtcacttttcttccaggcttctagtcttcttatcccaggaaatcagggctggatttttgtcgatgataccccctttttctggaagtcagattctctgtcccctcctcctgccataatgattttcagggttgtaagcataaggggatttttttttttttttcttgagatagagtcttgctgtgtttcccaggctggaggctggagtatagtggagcaatctcacctcacttcaacctccgcctcccaggttcaagcgattcttgtgccttagcctccagagtagctgaaactacaagcacacaccaccatgcctggctattttttttgtatttttagtagagacagggtttcgctatgtgggccaggctggtcttgaactcctgtcctcaagtgatctgcccacatcagcctcccaaagtgctggaattataggtgtgagccaccatgcccggcccactgggggatcttgttaaaatcatgaatgtacaggtaataccagcagagatattcatattctctctctctcctctttctttctttctttctctcttttctttatctttctctttctctttttgtctttctctttatcaaagcctaagcacagattcttattcatcatgtcctgggggaggccaggaatctgccatttttagccagcacacaaagtgattctgacacaagtggtttgtggtggctgcagggcccagagctcaaccaggaacagataaatccctttgttgggctacaaataagttgtttataagtctcagtattcagaatggtcttctatcactcaagagagaaaccacagtagtcaagagagaaacaccaagaaaatgggcttatagatatcaacgtggatattttagtatttgtgtctgtaaaaatcatttttgtgcagacattgattttgctgttacatttttttaaacaattcagatgccattttcttttttcactcaataaagttttaaattatctaatacatattgagttttaatttttttatcccaccacactattttcaaattaaattaatacatacaaataggtgtatggattagaacaaaaaaggtaaaactcattatttgcagatattataatctacatagaaagtctaatagaatctaaaaaacacatgggtcaaagaagaaatatccagaggctgaggcaggaggatcacttgagcccaggaagtcgaggctgcagtaagccatgattgtgccactgcactctggcctgagcaacagagtgagaccttgtctcaaaaaaagaaagaaagaaatcttgagaaattaaaaattattttgaactaaatacaaatgcaaacacaaatgatcaagaattatgggaaacagtaaaagcagtgcctagaggaaaatttatagcattgaatgcatatattagaaaagaagaaagatgtaaaaatcaatctcctaagcttctaccttagaaaatggacaaagaagagcaagttaaatccaaaggaagtagaaaaaaataaaaattatagcagaaattaatgaaattgaaaacaggaaatcagtggagaaaatcaacaaaaccaaaagctggttctttgaaaagacagataaaatcagtaagcctatagccaagctaactaagaaaaaagagggaagatgcaaatgactaatactagacatgaaagagggagcatcactacctatcccatgggcattcaatggataataaaagaatatatgaacaaatctatgcctgcaaatttgaaaacctggatgatatggaccaattccttcaaagacacaattgccaattgacaaaactaacacaagaataaacaaacaatctgaataagattctagtaaataaatggaatcaataatgaataaccttccaaaacagcactgggcccagatggttttacgggtgaattctactaaacatttaaggaacaaataccaattctgtataatttcttccagaagacagaattagaatacatcctaatcattctgtgagaccagcattaacttaatatcaaaaccagagagagattataagaaaagaaaactaaagatgttgatctcttatgaacatagatgcaaaaatcctcaacaaaaatattagcaaatcaaattcaacaatgtatgaaaaaaattatatactacaagcaagtgggatttattctaggtagcaaggctgattcaacattcaaacctgaattaatgtaatccctcacatcaacaggctgaagaaaaaatatcacatgatcatgtcaatacatacacaaaaagcatttaaaaaaaatctaacatccattcatgaaaaagccctcagcaaactaggaaaaagggggaacatcttcaacttcataaagaacatctacaaaaaaaacctagagttaacatcacacttaatgatgagaaacttagaagtttttatgctaagatcagcgacaaggcaaggatgtcccctcttaacactccttttcaacatcatactagaagttctagctaatgcaataaaatacaaaaaggaaataaaaggtgttcaggttgggaaagaagaaataaaactgtctttgagatgacatgattgtctatgtaggaaatctgagagaattaaaaactcctggaactaataagtataacaagattataggatacaaggttaatacacaaaagtcaatcactttcttgtatatcagcaatgaacaattataatttgaaattaaaaacacaataccatttgtagaaatatcccccaaaatgaaacacttggctataaatctaacaatatgtagaaattctatatgaagaaaactgtaaaactctgatgaaagaaatcaaagaactaaataggtggagagatatttcatgtttatgaataagaaggctcaatattgtcaagatgtcagttcttccaaacttgatctataaatcaacacgaccccaatgaagacccaagggagttattctgtggatataaaaaaactgattttaaagtttatatggagagtcaaaagaccagaatagacaacacaattttgaaggagaggaacaaaacaaaaaacaaacaaaaaaaccaaaaaaacactgcctgatgtgaagacttactataaaactacagtaatcggctgggcacagtggctcacgcctgtaatcccaggactttgggaggccgaggtgggtggatcacctgaggtcaggagttcaagaccaacctggccaacatggtgaaacccataacccattttgtctctactaaaaatacaaaaaaaattagctgggcatggtggcaggtgcttataatcccagctactcgggaggctgagacaggagaatcacttgaacctgggaggcagaggttgcagtgagctgagatcgtgccattgctctccagtctaggtgacaagagtgaaactccatctcaaaaaaacaaacaaacaaacaactacactaatcaaggtattggtgaaagaatagataagaagatcaatgcaacagaatagagaacccaggggccagcgcagtggcccatgcctgtaatcccaacactttgggatgccaaggtgggtggattgctttgagcccaggagtttgagaccagtctgggcaacatggcaaaacctcatctctataaaaaatacaaaaattagccgggtgtggtggtgtgtgcttgtagtcccagctacttgagaggttgaggtgggagggttgcttgagcccaggagatccaggctgcagtgagtcgaggtcatgccactgcactccagcctccagcctgggcatcagagtgagatcctgtttttaaaacaagaatagagggcccagaaatatacccacattaatatagtccactgatctttgacaaaggagtaaagagaatacaatggagaagatagtctgtttaataaatagtatggtaataactggacatccacacgtaaaaacacgaacctagacacagacctttcactctttacaaatattaagtcaaaataaatcatagatgtaaatgaaagttggaaagtaaaaactcctagataataacacaggaggaaatctatatgaccttgggtttggcaattaccttttttttctttttcttttttttttgagacggagtcttgctctgtcacccaggctggagtgcagtggcgcaatcttggttcactgcaagctctgcctcccggattcatgccattctcctgcctcagcctcccgagtagctgggactacaggtgcctgtcaccacgcccagctaattttttttttttgtatttttagtagagacagggtttcaccgtgttagccaggatggtcttgatctcctgacctcgtgatctgtctgccttggcctcccaaagtgctgggattacaggcatgagccaccgcgcccagcccccaccttttttttttcttaaaaacagtttattcaagccactatttgaatatttcttttttttcaccttttaatatttcaataggcttttggggaacagatagtgtttggttacatggataatttctttagtggtgatttctgagattgggtgcacccaccactcgagcagtgtacactgtacccaatgtgtagtctttcatccctcaccacctcccaccctttctcctgagtccccaaacccattgtatcattcttatgcctttgtgccctcatagcttagctcccacttatgagagagaacatacaacgttctgttttccattcctgagttacttcacttagaataatggtctccaactccatccaggttgctggaaatgccattatttctttcctttttatggctgagtagtattctattgtatatatatcacatttttttatccactcgttgattgatgggcatttgagctggttccatatttttgcaattgtgaattgttctgctataaacatgcatgtacaagtgcctttttcgtataatgacttcttttcctctggttagatacccagtaatgggattgctgaatcaaatggtagatctacttttagttctttaaggaattcagactgggtgcagtgactcacacactttgggaggctgaggtgggtggatcacttgaggtcaggagttcaagaccagcctggtcaaaatggcagaaccccatctctactaaaaatacaaaaaaaaaaaaaaatagcggggcatggtggcatgtgcctgtaaatccagctacttgggaggctgaggtggaagaatagcttgaaactgggaagcagaggttgcagtgagctgagatcacactactgcactgcagcctgggtggcagagcaagaccctgtctcagaaaagaaaaaaaaaaaaaaaaaaggaatccccatactgtttttccatagtggttgtactagtttacattcagcaccagcagtgtaaaagtgttcccttttcaccaaatccacgccaacatctattatttttttattatggccatttttgcaggaataaggtggtattgcattgtggttttgatttgtatttccctaatcattcgtgatgttcagcattttttcatatgtttgttggccatttgtatatcttcttttgagaattgtctgttcatgtccttagcccaatttttgacaggattatttgttttcttcttgctgatctgtttgagtttcttgtagagtctgggtattagtcctttgtcagatgcacagattgcaaagattttctcccactctgtgggttgtctgtttgctctgctgattgtttctttcactgtgcagaaactttttagtttaattaagtcccatctatttatctttgtttttgttgcttttgttttgggttcttggtcatgaagtctttgcctaagccaatgtctagtagcatttttccaatgttatcttctgtaatttttacggtttcaagtcttagatttaagcctttgatccaccttgagttgattttttgtataaggtgagagatgagaatccagtttcattcttttacatgtggcttgccaattatcccagcactatttgttgagtagagtattctttcctcactttatggttttgtttgctttgttgaagatcagctggctataactatttggctttatttcggggttctctattctgttccattagtctatgtacctatttttataccagtaccatgttgttttggtgactatagccttatagtatagtttgaagtcgggtaataagatgctttcagatttgttctttttgcttagtcttgctttggctatgtaggatcttttttggttccatattaattttaggattttttttctagttctgtgaagaatgatgctggtattttgacgggaataacattgaatctgtagattgcttttggcagtatggtcattttcacaatattgattctacccatccatgagcatgggatgtggttccatttgtttgtgtcatctatgatttctttcagcagtgttttgtagttttccttgtagaggtctttcaccttcttggttaagtatattcctaattttaaaaaattttttgcagctattgtaaaagaggttgagttcttgatttgattctcagcatggtcactgttgtatagcagggctactgatttgtgtacattgattttgtatcctgaaactttactgaattcatttattagatcttggagctttttggatgagtctttagggttttctaagtatatgatcatatcatcagtgaacagtgacagtttgacttcctctttaccgatttggatgccctttatttctttctcttgtctgactgctctggtcaggaattccagaactatgttgaatagaaatggtgaaagtgggcatccttgtattgctccagttctgtcaactttccccattcagtataatgttggctgtgggtttgtcatacatggtttttataagcttaaggtttgtcccttgtatgctgattctgctgagggttttaatcctaaagggatgctggattttgtcaaatgctttttctttatctattgagatgatcatttgatttttgtttttaattctgtttatgtggtgtatcacatttattgacttgcgtatgttaaaccatccctgcatccctggtatgaaacccacttgatgatggtggattatattttgatatgctatttgatatggtttaactgtgtccccaaccaaatctcatcttgaattcccatgtgttgtgggagggacctggttgggggtagttgaatcatgggggcaggtctttcccatgctgttctggtgatagtaaataagtctcatgaggtcggacacatttataaggggaagtttccctgcacaagctgtctctgtgcctggtgccatccatgtaagatgggacttgcttctccttgccttctgccatgattttaaggcttccccagccacatggaactgtaagtccattaaacctcttttttttttttttttttttgagacagagtttcactcttgtcacttaggctggaatgcagtgatcttggctcaccacaacctctgcctcctgggttcaagtgattctcctgcttcagcctcccaggtagctggggttacaggcacccaccactatgcctggctaattttttgtattttttctttatagtagagatggggtttcaccatgttggccaggctggtctaaaactcctaacctcaggtgatccacctgccttggcctccaaaagtgttggaattacaggcgtgagccactatgtctggcccattaaacctcttccttttgtaaattgcccagtctcagttatgtctttgtcagcagcatgaaaacagactaatacagtaaattgg

SEQ ID NO: 29 - DNA, 1762 bp, Homo sapiens
gcgccctcgccgcggacaccggagctgcggccgctccccgctgtcccccagagatggcagatcctgaggtagttgtgagtagctgcagctctcatgaagaggaaaatcgctgcaattttaaccagcaaacatctccatctgaggagcttctattagaagaccagatgaggcgaaaactcaaattttttttcatgaatccctgtgagaagttctgggctcgaggtagaaaaccatggaaacttgccatacaaattctaaaaattgcaatggtgactatccagtacttgcagctatacaatgtctccgttgggaatcatgcttatgagaacaaaggtaccaagcaatctgctatggcaatctgtcagcacttctacaagcgaggaaacatctaccctggaaatgatacctttgacatcgatccagaaattgaaactgagtgtttctttgtggagccagatgaaccttttcacattgggacaccagcagaaaataaactgaacttaacactggacttccacagactcctaacagtggagcttcagtttaaactgaaagccattaatctgcagacagttcgtcatcaagaactccctgactgttatgactttactctgactataacatttgacaacaaggcccatagtggaagaattaaaataagtttagataatgacatttccatcagagaatgtaaagactggcatgtatctggatcaattcagaagaacactcattacatgatgatctttgatgcctttgtcattctgacttgcttggtttcattaatcctctgcattagatctgtgattagaggacttcagcttcagcaggagtttgtcaattttttcctcctccattataagaaggaagtttctgtttctgatcaaatggaatttgtcaatggatggtacattatgattattattagtgacatattgacaatcattggatcaattctaaaaatggaaatccaagctaagagtctaactagttatgatgtctgtagcatacttcttgggacttctaccatgcttgtgtggcttggagtcatccgatacctcggtttctttgcaaagtacaacctcctcattttgacccttcaggcagcgctgcccaatgtcatcaggttctgctgctgtgcagctatgatttacttaggttactgcttctgtggatggatcgtgctggggccttaccatgacaagtttcgttctctgaacatggtctctgagtgccttttctctctgataaatggagatgatatgtttgccacgtttgcaaaaatgcagcaaaaaagttacttagtctggctgtttagtagaatttacctctactcattcatcagcctctttatatatatgattttaagtcttttcattgcactgatcactgatacatacgaaacaattaagcaataccaacaagatggcttcccagagactgaacttcgtacatttatatcagaatgcaaagatctacccaactctggaaaatacagattagaagatgaccctccagtatctttattctgctgttgtaaaaagtagctatcaggtttatctgtactttagaggaaaatataatgtgtagctgagttggaacactgtggatattctgagatcagatgtagtatgtttgaagactgttattttgagctaattgagacctataattcaccaataactgtttatatttttaaaagcaatatttaatgtctttgcaactttatgctgggattgtttttaaaaaaactttaatgagg

SEQ ID NO: 30 - protein, 493 aa, Homo sapiens
MADPEVVVSSCSSHEEENRCNFNQQTSPSEELLLEDQMRRKLKFFFMNPCEKFWRRKPWKLAIQILKIAMVTIQYLQLYNVSVGNHAYENKGTKQSAMAICQHFYKRGNIYPGNDTFDIDPEIETECFFVEPDEPFHIGTPAENKLNLTLDFHRLLTVELQFKLKAINLQTVRHQELPDCYDFTLTITFDNKAHSGRIKISLDNDISIRECKDWHVSGSIQKNTHYMMIFDAFVILTCLVSLILCIRSVIRGLQLQQEFVNFFLLHYKKEVSVSDQMEFVNGWYIMIIISDILTIIGSILKMEIQAKSLTSYDVCSILLGTSTMLVWLGVIRYLGFFAKYNLLILTLQAALPNVIRFCCCAAMIYLGYCFCGWIVLGPYHDKFRSLNMVSECLFSLINGDDMFATFAKMQQKSYLVWLFSRIYKFISLFIYMILSLFIALITDTYETIKQYQQDGFPETELRTFISECKDLPNSGKYRLEDDPPVSLFCCCKK

SEQ ID NO: 31 - DNA, 31810 bp, Mus musculus
cacacacacacacacacacacacacacacacacacttctatccagggaatgtggtaaacatttcttctctctctgtaaagactttagaaatccaggttaaaatggaagaaaaccttcttaaggcagagacagctcagaggacaaaggtggccattgcagaagaaatggaaaaaggttgtccttgtactacaactgtgctcgttggatacaggcacaaaggactaaggaacagacagacaccttcctagaaggtctatggcttcagagggcattggaattaggtgaagggtggacttgcaggcaaatcttctgggacaaaatgggatgctcagactatttgtaatggttccatggttttgggtgttctctgcaatcggaagcctggcttgcaggaccttggcacggggtgtgcagattatacctccttcagaagctcccccttgcaaatgccatcttgttctgtaatttgtctttctacaactaatcacttgtatattctatgcctttgtctcatttttcaaaagctacatatgagtacatattaaagatgagattttcattcgaagttgaaaaactacccaaagccttctgttttcctgatactgctttgcactgaagtgtctctcttcagcattcaagataacagtatttcctgttttctccggtgggtagagaatcttcagagacagccatgttttcagtggactgaaatctcaccaattaaaatgagcagtgtttgttttctgtgagcagcgtccacaggcaatgagatgcagaagcttcaggtacagaatttgctcactgatatcaagtgcctacgacacagtagatgctcgataaacgttcactgggtgaagtaaaccaacctaggagccttgctttgttctttgatgacgtagaaatgttcccagttagtcctgagcactattgtgggaagttttggacatgttccctcattcacagggcaaaccttccacgtcagcagattagaagtcgcatggaaagccatctcttgagcgatggtcaagtcaactggctgttattttactcattattgttcactgtagttaggtaaaaagtggctcgtagaatcggtactctccagtgcctgcgtggagcttccacgttgctactcagccaaccttattccttactcctgtgagcagccttctcccgactcttcctcctgaggatctagcagcagaaagcagctctatgtccctgcaaaggagctgggcaccatcgccatgaagtccatgctgaacttctatgtgctgggggtcatgttgaccctgctttccatctttgttagactgatagtgtcactgggaggcttattagagagcccattgcccaggagttcctggatcacagggggtcagctagccaacatacagcttctcaagggtcttccagaccatctatccagacctgaggagtgcagtaaacctccctccaggcatcagccatactttgacacactagcatggacaacatgttccatttcccaagaggcagcatcaagtgtctccaaaggactgttactaggcctagcaggacattttttttggggggagggggtcccttaccctgaaagagagcctatttactgtagagctgtgagtgggttttctgcggctctgggatggaggtgtaccagttccagctgttgggagaatggtttttggttgagcttgtttcagttctctgtcctaaaggattcctttggacctaagtatcttctgttggtttactattgagtctcttccacagagttgtatggacagcatctaaggggttgtgcattggctatgaagacagagggaggactatccagtgtccaggtcaagttgtacattaagttctttctccagtgtaatgcacatatgtttgcatataatgtctaaagggctatggtatgatcaggcctgctcagggtatgggtgttccagccactgtgtggcttatagacattttttcccttttagaaaaattattattattattataacttctatttttcttctcgctccagcctcaagatttatttattatatgtaagtacaccgtagctgtcttcagagactccagaagagggcatcagatctcattatggatggttgtgagccaccatgtggttgctgggacttgaactcaggaccttcagaagagcagtcagtgctcttacctgctgagccacctctccagccctctacataaatttttctaatacaataaatgtgaatacacacacacacacacacacacacacacacacacaccccacatacatatatgaatcactactcggacacactccttcgctgcctcaaagttttcatcctgctgtaccataagaggccaaatgactgatcttcatttggcttttcctttgattctaatacagttatatttttgtttcccagtgtatgtgtgtatgtgtgtttgggggcttccattatcatatatggtatatatgatatatatcatgagagagaaaagtgtttttttttttccttaaggaaatgtttaatgttgagcctgaaagacaagatatgatgaaatgcaaggtttgcactgaatatagactgaaatctcataaattaaaatgagtcatgtttgttttctataagcaatgtctacagaaaaggaaatctagaacgtcacacagtatcatgggacaggttctggggagctgtgtgctcttttaacccttgtcctcgggcaccggtcccatgagtacctgttccacgatcctgtgtgttactgtggattgaatcccaggcctgctgcatgctaggcaagtgctctaaccactgagatacacactcctagcccctcaaggaaccattagtgagaaagacatacgaagtcaaaaggattcacgtaagctgaatgtgtgtgtggtgtgtgtgtgtctccccttgtgtgcaccacacactatatatttaaaaagcaacatgtcatccctctcgatgtcacattcaataacacctccccaaatggtattctatctatagcatcctagaaacaagagcaaaaagagtctacacattgcattttaaagaactcattctccatcctcttagtctgttcttgccttggatgtttcagggaagaaccatttccaggactccgtttctaaggcaggggcaaattctatgatggtgaggtttgatctggatctacccagaccacaccttccattcctccgcagaagggtagcatcttggggttgccttcatagaagaggcacttttaagtgtggtagctcaataccctgttgacgtatattttccataacttactttaataagagttcaacctcccagcccggcagtggtggctcatgcctttaaccccagcacttgggaggcaaaggcaagtgaatttctgagttcaaggtcagcctggtttacatagtgagttccaggacagccagggctacacagagaaaccctatctcgaaaaagcaaaaaaaaaaaaaaaaaaaaaaaaaaaaaaaagagttcaaccttccctctagtgcaccacccaccagaggaggtggaaaagaaaggttattaggatgctgggacaatggacctgctagaactagttctttgggtcaattccaatcttctttgttctcagtccagtccactagcaaacaccaaacatgaatcagaagctttagtccagtcaactcggcagacaccacacacgaaccagcagcccctgcaatccagtccacttggcggacaccacacatgaatcagcaactgcagttcaatccagaagaaaccattaggctcccaaaatcggctggaatccttggaagtggcagaagctgcagggacctcaggagaagttctctggcgagtttctctctatgaagtcaccacaaccaaagctcagcaatgcaatctaaaatgaaccaatgcatgtgtgttatcagtgaaggctagcaaggcagagcaaagcaaaccaacgcttgagctcccactgtctgcggggtcatatttatattccttctaaacattatgcatcctttcacaacatagtttgctatagcaaaacctttcgctgtgtctgctctaagcaaagtgtcctttagcctacatgccccaacaaaacaatacttgccataattgatgaaaccaagttaatatttaaactgtataaagtttgcatctattttcaagaggacaagggaaagtgttggtcacatgcttcaaagttaccttctttaggcttggcatggctgtgtgtacttctattcctggctgagagcagagggtagcctgaactcaagagtgtgggaatggtacaggtagtggaatgaggtcgaccccattttacaaagagagaaggaaaaaaaaacacatagaagaagtccccactattatgtacaaagttaaaaatcaaaggttcaaattactattggtgagctcctaatttttttgagtacacatatacatggtgtatgtgtgtgcacatatgtgtacgggcacacctgcctacgtgggcatgtgtggaggccagaagctgacatcagaatgtcttcctctccatgagagagatggggtccctcatactgttcactggtttaggtttggcttccttgcacggttagcccctggtttctgcctccccggtgctgagattactgtgtggaatttcttgtgtgggtattagggatcccaattcaggtctttaggcttatatggcaagcactttacccaccgagctgtctccccatcctctgaacatccagtctttaaataaaataaaaattgcttaagtgtatccataatatttattcactctttaaaaatatacatttttcccaaaatgttataaaggcaaaaatattcacacgtttagtgtccatttcctgctaagaaaagaatcaatgacctgctttgtagtgccatatttagaattcaatgtgagcaaacctaagaaaaacctaagcttgtttcatattcaagacattgttcagtgctggtatgcagcagctctggtttctacataaacactgcagcaccccagaaccacagagaaaatgtcagcaggcagcaggcaggtggatggatggatggatggatgtgctctggccactgcttactgcaaacagccagatactactcttgctttaggaaggacttgacagcgccccctgtctctcctcacctttaaatatttctgtcacgcagcgggcttggctctgtagccgagccagtgtgagtggtctcttgggctgtgctctgagtgtctgtgcagggagctttgaggagagcaagcgtggacgagcttggaaagccacgacctgaggtggatggacagcagacacagaggtgcccctgtgataagtagagatgggagaggaagagaagggaacggtgtgtgtgctctgaagagaggtagaactggagacaagagagggtggtgacagcctgatgtgagtagcccgtgcggccacctgaggccatggttaggtcctggccaggtctggttaccaccgtggtagtaacaggggtctgtatcaatgttatcaccagaggctatgcagatgtccccggtcaggtcttcctcctggagccatctcgatgtccaagggctaagagttgtcttgaacctcaccagctttggtactcaggcgctccagagagcaggcccactccttatctgggcaacttgagagagctggccctcagggcatgagttagggagcagaccctgtccctcactggctgcaccacttgggagagctgaccctggtaatatgggagagctggccctcagccctgagggtgtgagagcagaagagctggccccacccctagctgggcagtgctggagatcaggctctggtagcatgggtgcaggcgagctaaccctgactgtataggagtgggagagccagcccttcctcttgccagctgccacaagcagaaatggccgtggttgttttcacaaagaagaactggcaagccgaacaactcagctaccacctaatctcagattattaagaatcataacacaggcgtggtggcgcacacctttaatcccagcactcgggaggcagaggtaggtggatttctgagttcgaggccagcctgttctacaaagtgagttcctggacagccagggctatacagagaaaccctgtctcgaccccaccccccacccccaccccccaaaaaaaatcataacacgtggacacacctgctattgccttggtgacagatgtctctaaggtagggcttagtactgggcatagaagttatccgctgacacaaatcctgtggctatagtgtaggtttctgcaggggcggggactaagctttccttgttcttcactcttgggtgtactgcaaagatcttctaacactgttttgttttcttattattcccactctcccacttatgatcccatagaaaggcactgcaccataggggatgactgtcacttacaacccagagccacaggaccaagggctgtctatatgcatcatttgttcaggtagatgtcacatggcagataggacaacagcagccatgtgtcatggtgaaattctggaagagccctctttctattaacttttgaggaggatattcactatctctctttaaaaaacaaagccaagaaaccttgcctatttattctttgccgggctgggatcaaacccaagctactgcacatgtgggccaagtgcacatagatcctggagatgttagttgtgaggactctggctgtcaggccctcaaaaagtattactttgcatcatctctgctgggaccagtgacggcacagagaggacttggaaaagggttggtctcacgagtccagtcatgctaggctcaaataaaaacttcctccagtgagactctccttggttgtgcagacaatagtatgttggcaaactattccagaacccaactgtaaatatgttttcagaacaaataaacccagagctaaaaataagctctttgtaaggttaaaggtccctaagaaggaagtgaacctgaagtgctgaacaatgctctcaaggaagctgagataaacaatagaaaccatgtgggagataaacaatagaaaccacgtgctagggtcatgccggccccaagacggtatataaaccccgccctcagcagaaggcatcagatcatcctctcctctctcaagttgctcttctgttcatttgatccgagtcctctctactgacaccatgggttgctgtggttgtggaggttgtggtggctgcggcggctgcggcggttgtggcagctgtggcggctgtggctgtggaggctgtggctgtggtggctgtggaggctgcggtggctgtggaggctgcggtggctgtggtggctgtggaggctgcggtggctgtggcggctgtggaggctgcaacagctgtaccacctacaggtgctaccgggttccctgctgtggctgctgtggtggctgctgcggttgctgtggctgctgcaagcctgtggtagtctgctgctgccgccgctcctgctgccgctcctgtggctgtggctcctgtggctgtggctgcggctgtggctgtgggaagggctgttgccagcagaagtgctgctgccagcagaagtgtggatgcaagaagtgctgttgctagcatggctgctggccccctggcctcggggccggtgatggttggacccaggctcatatacttagacttttagactgtatgccctataatccctcccagttcacctatcaagctgtaaggcttaataaacatagctgagtagaacgcggaagactaaaatacgtctgtgctgtgctgaagatgcctagccatggataaataagtcagcctccctgaatttgctcattcattgatgaaataatgaagctgaactcagaatctctaaggacctcttcttctttaatagcatatgcatcttcgagtccttaaaactgaactcagggcccttccacctttacccatggaagatttcgcttctatttctgatattcatagtgcatgtataatgtgaatacagggagcattataatgtgtttatattttagaatccaccctcagcccactatgaacggccagtgataatctgcagaagactcccattaaagacctcagctgagtgaaagcaatgtgaatatattctattattttgaagcacttgcctttcaagagatgcatgtattatatgtctgcttacattggctgtatacaccacgtgttttaactttaaagtgttccctccttccccaatgtaatttatgaataaaacaatggaaaatactgtgtttcactgtctttgaatttttttttcagactattggaactgatgttttggcaacacaggttgcgaactccaggaaagtttaaaaattgagttaaagtttgacactgaatataaggaaacgaaagctactgagattgagtcaatagactcctgggttgttttacgtgggctaagggctctctccatttagttattcaggagatgggctgaagaagctattgacatggtcaatgcatgacttcttagatagtttagttgtttccggtctatgtggaaaacaaggtagacatagcctagtgcttgcaaagcaatgtggcttgaaagtgacattgttttctttccctctctttctactggtttgaagtagtcacatggtcttacttagctgtaagtggataagtgtgaataagtatggagatgaattaatatgagagaaaattcatatatctttatatatgtataccaatatatcagtggctacctatgcactatgtgactcatgatttttcaagacagctaaggcagctttactacctatttatatgccttggattcttgctggggtagttcaaccagtcaggcagcagactgcatggttaagacctggcttgtcatcatgtgaaccctttgcatgggatggaactgcagtgacagagggttgagaagatagcaggagctggagagtcctgacttatcttacaaatattacctgtccttctagatacaaacatacacatggttcaaactgttttcaaacgatctaatgatggaacctagatactctaaagagttttctccaaacatttgaataagacagcaataactgttttgtttgttattcatttcagtgtcttttcagttgtcctctctgtaaacaaagtggtattttccccagagccgcctgcctttgaaatctggatatgcagtgacaggatggacctttatgagatacacaaagcagcacaaactaaaggcttgttcctctgtctgctatagttgaggaggaccatggcagacatggaaccttcgtctcccgtctagcctctctgccattgcttttatcatagtgtccatatttgatcactttccttctggtgccattagtcaaacctcccacaggttgtaggtgggatgtgtacaaaggatctactttacaagactgggaaaattaaggattaaaaatgctgcatgtgagacaatagcctgaaatgaaacactaatatttagagtaatcaggaatacttgcagagaagattgctttccctaatcttatacaatgttcatattcttactgaataactccaaaataaggatactttatatataatatccttgtatcgtccaataatataaaactatgaaaagtagtttattctaattggatatactttttgtcttcttagatttttacaaggcacatcagtagaggaatattttaggagttatgccacacaagcttttttttttttaaatcagtttttacttacctgtattcatgtgtaagttcatcacacagcaacattagatttttttttctatctgtttcccttcatcctatcataatatgattattggttcccgtcataatcctcacaataacatcctgccctactggactctgaactgctttccacaactcatttttcataagtgctaaactttaaccagaacgttgggataaaaggccaggcagagagctacacgagcccagccaccctgaggaggtttctaactgaaccaggaaaaccatgacgtgctgtgaagggtggacatcctgcaatggcttcagcctgctcattctgatcctgctaggagtggttatcaattgtatacccctgggaatcagcttagtggaggcagactcgacttctcaaaaccccatctcctgctatgagtggtggtttccaggaattataggagcaggtctgatggtgagtaatacctacatgaacagacttggagaagggtgtctgatgcctttaactatgactttcagccttgcacagttaggaatgtgattaccatcaatttataatgttacattgtgaagaatgataatttatgtacagaaagcgatggtccatcttagggaccttaaggcaaaaagcaggttaagtcgttacctatagcatttcttcacaggtgggatgatacctctgaactttattatttaacattaaggaacttcagtttttcttttttaaaacatggtgctggcgatggaactcggggccttaaccactctgtgggatattgtttaaatctattgcctctttttctctgccccatcctgatttctaggtatagggaacgtggcagcagtgggaacttgctctacgggaatgagaagcacccctgcgcatgggtagccttggagatggcatagtgaggcttagcctgcttctcaagggagctggcctaagacatagagttcgaaatcctgggtctcttttataagatgcttggccatggtcatggtgttttatcacagcaatagggaagcaactaagccagtttctgacctcaacaacttttggttttgagtattacatagatcccagaaagcttcagagttctatagtctgatgatggtgaatgggtgttccttgttgaaatctgatgcaaggtgggacaacacagatttcatgcgttcttaacagtgaactatcagagtcaggttctcattgtctcctagaaattgtgatgcagccagtctgggtagaacacatttgtagaatccaattttcagatctggaagatgcactcctagcagtgccccagctgagacaggccatttagaaaaactcagctatctctagatatgaatttgcattgctgaaaacacaggagagaatattttaaagctttgctacaagtagtaaagagcacgaggtagtgatggtacccatctacatctcttgggctttttttttttttttttttttttttttgagaaaccaaggagccagagactaaacagaccagaaaggacaggaggcatagaacattcatttgttgacatcttgctggaaagcctagtttagcgtacatcctgcctagtttccactctacaatcatctgggctgcaattatcacttgtactttatataccagaaaacagaaggctgagaatgttagccaggtcacacaatgggtgtgaaacccagtgctagatttatctaatgccaaagctagttaaaatactgtcgtcctcaatctctgcctcaggctcacagaggtcaaagataaaatccacaaagtaaaaggaccaggaagctgagtcacacaaaggcctacacacctgggaaacacttgagagaatctggactccttgtcttgcctatcttgcttccctcaataaatattaaccaaaggtcattagagcatcaaactcatggagaagtctgatgctctccatacgcagaccctcaagctggaggttagcccgactagtaaacaggtgctaacagcagtgctcggaaggcaagcatactttcatgatccttggcttcacataaaaggatgaatcacattttttttccgaggggagttatgtcccttgtgacatctgtcaactcacttctgcagacactttgtaaagaagaattcactaagtgtgttgagcatttgtttagtccttaaaacttttggccagttgttacatttcaagttagcctcccttcagaaatgggaattttacaggaaactgcatataacacaacctcagggctcattactgattactttatgaagtcatttgttttatgattttatgaccaaccccaatcagaggtgaacctttttatcttttgaaactgtaaccaagtaaaacattatgtagttaatctttaagattatctactaaggggaaggggattgtcaatataaatgttacttgatcaagcattaaaagcattttaaaatgtttgttgtaaaatataatcagaaaggctcttttactttatataaagttaactataagcctggtcttactcattctttttattgatttttacccattacataagggtacttttccaaagccagttattaaaatcttagtggaaaacaaatggctgtaagtcaaactgattagaagactgcatgcaaaccctttacaaagcagagcttctgcactcatgctgagctatggctttaagtgttgttctcatgttcaagaggactccccagagttaggcttctatcacagtttttaactaaggttcttgtgtgcttcctttatgaaaatgtacactttctagaactggaggaaagcctgggttcctgccaggaaaacaaactgtaattatttataaaaagaagagaaggaagactgaatttcacaaaatcttatgcattcaaatatgtttaggaatactcaaccctaccattttagtgcaaaagtagccatagataatatgcaaatggattagggttccaataaaactttatttataaaaatgaggtgacagggtggggagtgcatccttaccagttcttgtcctacttcacttgttatataagatcagaaagcagtgtcttctgggaacaaccaaaaaagcttagtgtatacatgatgacaaagatttcttttccctttccttctggtctttcagctatgcacaggggtagctggacatccatacgtatgtgtggcttctgaattggaaagggatcagtgttcagtgtataaacaaagcttagcaacaacacgaagtgacatgaagtcagcatgcgattagatggggtgatgtgtgctgggaaagctgccttgtgagagacatgaatctcttctagaaaaaccaggcagatgtggctttggaagacaacgggggaaggaacaattagaggcaaattgacatgagcaagggtgctggggttccaggacccaagagtgagtggctttatgaactgtaggtcaatgtgacacagtggcttagagaccacatgtctagaatggctctgaactttcccttcttaggcaagttacaccacctgtggtttgacagtggcacaataggccatacaccaatgctccattcaaggattgttacaaggctggcacagaccaaatcatgtcacgttctaacacctggtatgtagttacagagcctgctcatgttagcagagcagaagagtgggagaaccattccagggtacctaggatgcactgccaagcacccatcacagctaaaaagtcgtaagtggaaggaagcaactgatattctatgttcaacgatacaaaactcttagttaagcgttctagtcatagctgatagatgtctttttaaaaatagaaaactaactcttaataatgtgataccatttacagccctcctcagcagtacagaatgcactatacaccaagcttttgcctgcctttaatcccagcactcaggaggcattaggcagacagatctctgtgagtttgaggccagcttggtctacacagtgagttctaggacagccaaggccttatcttgtttgtacaaacaaacaaacaaaccaaagactcctactaaacatcagagtaaagtatggtcagtacatattagggatccaggagcagagaagggcatgggggaccaatggtcattctcaaatgtaggcttgggaactctggcaagctgatggttgtctgggatgtcgaattaagagcaattaaccagcaggagtggtggtgaattggtccctgccaaaggcaggcaaacaaaaacacgaatttccttcttcccagattgacttgcttaatttacaggaaatagataaggctgaaggagagggaagggagagaacaggggagggaaaggtggagggagtgggagatagcattaaaggtaaatttgggtgatagaacaaattcttttaagattctttccaaaactcatgcactaataagccaccctactctaaaatccaggaggctgcagcccacagggtaaacaggaacgtggacagaaggcttcatagctgctatcgactcttgccctctcagtctttacgggtgaaactgatgttaaggttcacgatacagcgatgtcagattagatttcctctttcgttctcctgggctctgaattcccccaacgggcaataaatggaaggtggcgatgattgagtttttatctgatgagaagagataatactcatctttcctgaaacttccattccaggccatcccagcaacaacaatgtccttggcagcaagaaaaagagcgtgctgcaacaataagactggggtgagtaccgtgcagcgggcttggaagtggagggactgcctcagcagctcctgctgggcctcaggcttgggtgacactgtcggggttggttaaacagtcatgtaaagagtgacaagagagcttctcttctctctagaagtttagctttggagctagcctttgatcctttcctcaacctttggttcatctaaagtataggaagttttgtttttgttttgtttttgtttttggtttgttttttttgagacagggtttttctgtgtagccctggctgtgttggagctcactctgtagaccaggctggccttgatcttagagatctgctttcccctgcctcccaagtgatgggattaaaggcatatgccaccatgcctggcagatcttgttattgaccaaaacgctgatggtttaaaacaaaacaaaacaaaacaaaacaaaacaaaacaaatcactagagtaggatattgagtattttctaaacccagcagacgcctctgattttccagtccttacacaatgtaagtcaagaacttgacaccgagggtctaattctctaaggccgggatagaccactgacaagcacccaaccatcatcaatacatgggactgagttcagcataaaggttttaaatcaatggttcccaatcagatgggaacacacaggttatctcaggagatttcaaaaacacaagtgcctgcctgcatggttcccaagattctgcatgtacaatcttccaaagcaccgggtgattccaacgtggggtggggtaagacccactgtcctaaagggaataaggaggtaggttgtgggcttcctttttaaatcattactttatgtaatgggtgttttgcctgcatttgtgtccatgcctgtggaagtcagaagagggtgtcggattccactgagctggagttgtggagggttgtgagctgatgcgtgagtgctggggactgcatctgtgtcctctggaagaacagcaactactcttaactgttgagccatttctctagccccagaaaataagtttgttcttaacagagcctgcttctggcattctgtttatttaggattacaataatcactttagccacagtgtttgtagtctttgttcctagtactttggtttctactgtcagtcacttttgttcctaaactaccataccttggtgcagtttgacttgacctcacttctacgtgatactcacaggatctcaagacctcctggtttatttctgactctcttaactggaaaagtatctgaatacttaaacgtttctcaaatctactttctattaaaatgtttttgaatataccctttcaagaaaattggtcccttttgtctcccttgaggatacaagcaggtgggaagaagcaagctatttgttatttttcaatgatgttgtctctctgtgcatatatgcatgtgagtgcagtgcccagggatgccagaagagggcactggaccccctggagctggagttacaggatgtggaactgtggatgctaggaactaaatttgggtcctctgaagagcagcatatacccttaaccactgagctgtctttccaatccttaacagaggaacttttcatgtagatcctggctttaaattaggttgttttgctcacaccagttttgaaaataatttgtgcatgcttcagcaaaatcatgggttgttcaaagctgagggtcttccagggctgctgtggagagggggtggggcacagaggcactctatattatctatgccgttagcaatagttctagtcatttaaatagtgactgcctgcctatatcaatgtcataaaacccccttacaatagcttttcatttgctggcaaccaggtgttcaggttacagttggtgccttctgggtcaagataaggccaaggtggcataaaattctcctcccttctcagcagggcaggaagggggcagcagggccttcccggtttcatcctttcttccttccccttttctttgtttcccaacatggtaagattttgctcaaccacttgaatgactggtcactcaggaagtaacaggtccggggtaacagcggctcttcttgatgagaaaattcggtaacttgtataaatcacagtagtgctggagaaccaggattgacagctgatcctagctcccatttctgtgtgcttccagctgaggacactaagtgacaagaatgggagcatgagtatttccgagatgagtttcccaacaagctgtcaaccttccttcccctttctctccgaaatgagaataccagtagatctcttttagggttgttcgaaggattacatgagatgccacacatgaggtcacaatcctctaaggagctaataagggaagaaaaatgctttcctattttcacttttgattttgaaataatcataatcactaacagctttgtaaaacacggaaattattcttgggggggggcacattcaacctttttgttttctatgccaaatttcacagagtttgtgtgactagggttcagacaaggcacaccctttccctccatcatggtcttctcaactctgggcatatttagaccctccacccgtattccaaatggactgtggcactgttgagatagcttttagttgtcattctggactgggagaatataaagtgatccttgcatctgatgggcagagaccaaggttgctgacacatcccactctgccttggaagggcccaatagcaacaagtccctccagtgggcccagctgagttaagctctcaactctgctgcttactgattacttcaggatgctggccactgtccgcatacaacatcagccaaaaatgcgaaagagttggaagccaagagcccagaaataaaaatttaggcagacaaggtctaatagaggttcaatgtaggtagaaccatataccataggaagagggaaccaggtttcagtggccaggaggaattcgtaaacccaggaatacacaagttgagaattttcagagacattaacaagtgtaattatcttttggcaactgtaattcaacagtgaactttgatctccgcctctttaaaaaaatccacacctaattaaactgcactttcatgtctcaggaccacacagggcaagggagatggctaagtcagtaaagtgtctgtcatacaagcattcggatctgagtttggatccctagggctcacataaaagctgggtcaggtggcacctgcctaaaaggctagtgttagaggtgcatcaaggtagatgccggagctcaggggccagccagcttagggaaatggttcactcagttccaggcccagtgacagacaatgtctcaaagataagttggagaatgaaaagcgctatggggagacactccacatcaacctctggtttacacccctcatacacacgaacacacatgcacatacagaatacactcacacacacatgtacaaataccatgcatgtatatacatcaacaaataagggggaaaaagatctaggagcacagactgactggagaactgcagtcagtaactaagactgctaagtgctacacactgctgctgctggaaaacttgaaacatacaatgacgcgtgcaaacgttgctgctttgttttccagatgtttctttcatcactcttcagtgtgatcacagttgttggtgctgtgtattgcatgttggtatcactccaggctctcttggaaggacctctaatttgtaatactcaggccaacagtactgtcacttgtgaattttcattgaaaaacttaaggtgagttgagttttgtcacacagtctcccatagctgtggctaactgtggtgtataatgctaagcttttctccgttctgactactgggacaaacattcgtagggacttggtgagctgataccaatatctaatgtctcaccaagaagtggtggggctgcttcaggtatggtctcatctaaatggtctagttgatctcaggtggcttatacatgcctggtaaacattcatggatatatgcctatgcctctttaaaagttctgggaatatatacttaatttaaacccttggggtacagtagtgggtgaggggaacatttactttctacaaatctgcattatttttgtttaaattttaagcaaaggagtgttttgcctgcatgcaagtgcaccactcatgtgcagtatccaaggaagccagaagagggcactgtacccatgggactagagttatgaatagtttatgagccaccatgtaaatgctgggatctggacccaggtcctctgcaagagcaataacagctcttttaactgctgagctacttctctaggcccttattttttatcatgtgtgtgtgtgtgtgtgtgtctcgagtgtgtttgtactgtgaatgtagagtccattgaggccacaggtgatggatccctgtacaactggggtcaaaggcagttgtgagctgctcctagtgggtgttaagaactgaacttgggtcctctggaataaaagtatgttctcgggacagatgaaccttctgatcatctgatatgaacctatcctatcagttataaaccatagatggcttacattttttgtgtatggtgttcctgtctttgtaatgtttgctggtgctgtgtggataggcatgcatgtgtgccaacatataaggaggtgtcctcctcaatttctctcctttatttactgaattaggagcctgacaattcagctaaccggctaggttcaggaatccccttgtttctgccccatctgatccccctgtcctgggcttccaggtggccaccctgtctccttcctgccctccccccccccccaagacagggtttttttttttctgtgtagccctgactgtccttaaactcagaaatctgcctgcctctgcctcccaagtgttgggcttaaaggcatgcgtcaccactgctggactgtctccttggtttttataagggtgctggggatctaaagtctggccctcccactttcatggcaagtgctttgttcatggaggcaccactcccaccctttgtactttcgaaatatcaatcaatcaatcaatcaatcaatcaatcaatcaatcaatcaatcgaaagagcagctagtagattcatgtggtcatgctatatacttatagacagcgataaaaatatttaagccatgcattggaagttacatacaaatggtccattgagaaaattctatgcctgaatttaggcatacttttcaaaaacaggaagaccaatctaatttactagctatctttaattagccacttagtttcggaaagctaccagatttaacttttttattaaaaaaactgttttctcctccattacctacagtaaaaaaaaaggtctttcaaaatgtgcatggtagttattattgtggactaaacaaaacccaaagaaattcctttaatagtaaggaaaatttgaactcccagccacagttactgcacacatttcaccctcaaggaagcaccagagctcactgacgtagtgggcagcaggcgaagcttcgagggcagcagcactgacatcccctcctagtctagttggggaggccaaggcagcagggtcattaatcctgtggtctcaaggaaaccaataggctcataggccatgtgctgcaaatactgttattctctcaggtccaaagtcagttattgggatctagaaatgtgttcttcctaagagtattccattttattggtatccccccccccccaaatcatcttgagatagatgtgttaggactaaaagcttcttattttatgctacaggcatgcatcattttaatcatgtatttgaaatgttgtgagtaaaaactatccacctggccaaagagcagatctatgttagaaactgctcctcccccccatctctctctctctctctctctgtgtgtgtgtgtgtgaactcatctgctttcctacctttggcaagtagaaaggctacacaaacaggttcacacctctgaggcttttgatatttatttccatcctgacatgagagagcatcagtttatcttaagatcagctgtcctatggagaatgacacaatgtgttcaaatagggttttaagcattagtgctgtgcaaatgtgctcagcaaaccagatcttagctatggtttctgtgtacaatctttaagaatgtacattgggttttactatactggggctcttactgtcttagtaggcacatttaacccttttctttttccctccagtaaatttgatcctgaatccttcaatctgctgtggttcttcaatggcacttgtgtttctcctactgattttaaaaaccccaccatcaataacatggtcagtaactggaaaatacccaactccaactctgaagaagacagacacaggattttccacttctcagtatttatgagtctcctgcttgttggaatcctggagctcctgtttgggctcagtcagatactcattggtttccttggctgtctgtgtggcgtctctcagcgacggagtcaaattgtataaagggcaataaactagaatatcagtactttgaataatttgaaaattgcatttaaaatatatacttttgtaagttcaataatgaagcatcttctagaacacagagtcattttagtgcaaacagatgtttttagaatcatctctgaagcaactttcaaaaaaaaaattaacctatcaagctgggcagggctggtacaggccttcgatcccagcactcaggagcagaggctggaggattcagagtttgaggcctgcctagtttacaaatgccaagacagccaggactatacagagaagctaaagcagaggactggcatgaactcgcactagcgcgtcctgtatgtgcagtgcacctccactccggggggagaagttaccagtgggtgacacaggggagaagcataggaaagcttttaggtttcttttttcctatgtatgccaaaagaacaattgtccacctcatggttacagaagtatgtgtcttagttttaagaaatatatattatgtgttttgggaggaagaccatgttttaaaaatactttaccctcaaagccaaagtgatggaaaaatgctgtgtttaactgacaggcacatggcaattcatcatactctatttttttatgtttgtatctcttcatgatatctgctaagactttggggaaaaaaaatcagccttttagaagctggtttttatgtatgctgatctttaaaagataggtaacaaaatgtatttattgtattaaaatgttatgaaatagaaaaaactaaaaatctacaattttctgaatgttctctctcctacaattgatttcaatctccattttatggggtgtcttagtcagggtttctattcctgcacaaagcatcatgacgaagaagcaagttggggaggaaagggtttattcggcttacacttccatactgctgttcatcaccaaggaagtcaggactggaactcaagcaggtcaggaagcaggagctgatgcagagaccatggagggatgttacttactggcttgctttccctggcttgctcagcttgctttcttatagaacccaaggcggtataccagcccagggatggtcccacccacaaggggcctcctcacttgatcactaattgagaaaatgccttacagctggatctctggaggcatttcctcaaggcaggctctgtgtcaagttgacacacaaaaccagccagtacgtggggcttatgatttgaaagtgggctggagagatggctcactggttaagcacttgctgttcctgcagagaactggactttggttcccagcacccacactagcatctcacagcagcctgtaactccagcttccagggagccagtcccttcttctagactgcagggcaactgtgcacacacaaatacgaaataaacaaatcttagaaagtgtgtttttttgtttttttctttaagtgaactggacagatggttcggcatttaagagcacttgctgttcttgcagagttcccggcatctacatggtggcttggtggcttgcaactgtaacctgaatcccaggggatccagaaccctattctggcctctttgagcactaggctcactcacatggcgggacaaacagacaaatacataacataaaaataaatcttaaaaacaaaacaaaacaacaacacagtcatgatggtaactacaccaccaattataactgaccaagtaaatgagtacattaagaacttgcaagtctctttctagcccaaactgcacgaagacattttccctaaaccacccctccccacacacccaccaacacttaaggcttatctttaggatctatttaatagtctacatacaagagcacaactcagagaacactcaccagaacaatacatttctcctcaaacatgaaggtccttctgtctgtccttctgcgtgtccatccgtccatccatccatcacagactgtaaagatcagggaccgtcccctcccactcatcagcctttctccacttctgctccttagtaagagctctcccccaccctcatcagatacgccaacctgccttacctctggctgagccgttttcgtccctaagtatgtcgtggctcttaaagaatttgacactgactttgtcaagccatctactgttgagtaggattccttttgcactcttgtctgagtttctctttctgttgctgtgaggaaagtatcttgacaaacgctcctttaagaagaaagggttactgtggcacacagtagcttccagctcaagagccagcccatcactgcggagatcaaggcagcaggagctggtgctggtgcagcagctgctcacactgcatccatctgcaagaagcaggtggatgaatgcccctgctcagccccttctcccactttatacaatccagggcaccatgctgaaggctgggggtggaggatggttcctgcccacaattaggaaaagttttcccacaatcacttaacacaaccaagataatcccccacaggcccatctcccaagtggttctagcttcagtcaagctgataattaacattaatcaccatgactctggtgttagtattccacaggcccatctctcaagtggttctggctttggtcaaggtcaagctcataaacactgtcatgactcttctctgtagaatgtagcaaaacactgttagcatttttccttctttttaatttagtatgtatgtgtgttttgcctgggtgtgcctgtgcactgtgtgcatgcactgccagagaaggccatcagcctcccaggactaagactacagatggttgtgagccatcatgtgggagctgggaaatgagcctgggtcttcaagcagagcggccatgctcttaactagtgagccatctctccattcctggtgctagcatttccttctgtgattcttacgctgctacatggcactgtcctacaccagagcagaagctccgtgggtgccaaggcacatgcattttactttctcctggtgtaaccagtgcatagcacagtacctcatgcaggaagggccaaggtattggtctgctgaataaatgctaccttcagcactcagacatgagtggcaacaatgcttactaaattaatatgaaactgctaaaagacatgaaatagaaacaagtttaaaaaaaaaaaagaatgccagctcactgtacttgactgaacaaataagagagctagctagctagggatatctgggatagatagaacttaagacttttctcatcgccctggaaagaggtgacattgtccaggtctctgctcagtcagaaaaaaggagacctaagtttcaaaaagaaacagcctttgacagtaccaccactggtgcaaacagacggcagattatttctatgctctttagtctttaggagactgcaggccacctgaagttatcctcttttgagggcatgcaacctttgatctggtatccaaagtagcaaatgctcgtctgtatacacgcaattgatgcaccaggtcccacctaacactaaaacactacaaggagtcatttgcaaaatccgatgtttctctcttcctccccaccccacccctttggcctttttttttttttttcaggacagggtttctctatgtagccttcgctgtcctagaactcactctgtagaccaggctaacctctcaaactcagaggatctgcttgcctctgcctcccaagtgctgggattaaaggtgtgcatcactccagcctgacttccaatgtttcttcactctcactcctatctccaagaccaatatcattttagcacgcatctggacagcttctgccgtctagaacgcatctctcacatgcatctgaagcttctttccctcagggaaacgtttcataatcctcagtctttaagagtttttacacttacacacttacttgtgtgtttatcatgtgtgtggttgtgcgtgtaccaccacagtgcttgtggaagtcagaagacaacttctgggagttagttctctccttcaaaccccagtcccagggcctgataatagcacctttacctggtaggtcatcttacaactcgcagtcctcattagtgtgcttcattctctcccacaccactgcccttaatctgtcaattccttaggaacagaaaatgcgtctaaaatatttccagaactagaaagacaaatgtcagaattctggaagtagtgtggtaaaatctgctgttcttagttctttgatgctcgttagccctaatgctatctttctgatcctccaggacccagatttgctgttgttgttgttctttgtttaatgaaaaatctgtgtctgttcaagtacctacaaaatatttcttgattatcctgattaggattgaatttgttaatactcattcccatgtccggcccccacacctgtgcctaatcaatataggacattctatctaagaatattcaagtctttgtataacactcattagggaaaataacagcttctgtactaacctcttaggagttccttttatttccaccctttttatgaaatcttttctatgcctgctcagcaaaagaagttatacatttaatttatcaaagtcacatactcaaagtacaagaaggaaccctccccctggattaatggagactcaagaacagtaatgtgaaatctactaagccttggaactttcctcaccctcttagtaaaaaggaaactgatgatgtgcaaagaatattgtagctgaagtctaactgttcttgaaaaaaatacacttttgaatactaaaggctcgatattagcaaggaagtattacaatagaaaaaaggtacataggcttataaaggttttgtttttgcttttttaaaaataaacctgaatcattctcatagatacaataaatgagcaaaccatttacagtgctagcaagccctgtgctggggtggagatctgagaaacccaggtggctcttgtgacccacaagtcactaattcactacttgcccctgggacaggagacttggataagatattcagtccacagccccataggatgaaataaatctttccatagacattgctttggttgacagtttattaaatacactacatttataccttattttttaggtttttaaatcattcacacatggacttggtaaaaacatacttgatagaaaactaagatgaaagtcaaaacagcattgcacacagacagactgctgaactgttaggagtttttagccccgcctgtgcaggtaggcgatgaagcagagtcaggtggtttgacttcagtcctgcacagcactgtgacttagaaagcattacagttgagatgtagatacaaaaagcatctatcaaagaaatcgcttcatcatctgaaaacaggacaaaacacttttctttcacagacagttttctaaactcactctttatgactgccatttctgtttagagaattagctgtacagactggtgaggccacaaaaattattttctttaaaaacaaaacaaacctagagcctatttacaagacatgcaaaaggagagtgtataggtgccactgcacaactggctgaacgcccatcagcagcaccacaggccttcactctacagatacagggccttccctgcactctggagaaatacattttcagggccgtcatacgatgatgcaaagacagaaacaatgaagtttgcaaatcctttatatttccaggtgttgagacaatatatgtgaatgctgaggttacctctagcgtcgaaaccagagccagctgttaagcagccagaacgctacagtgattgaatacatgaccatttctcttttagcacgctctttattctcctcttccagaagttggagacgtctatttaatttgattatctaagtgaaagacaaatacaaaatacaaaatggtactattgcatgcatacagcaatcagatttttaaaaaagtcgtatataaacttgtcaaagaaatcattacatataaagttccattctggatcaaaatgaacaaaattataaaagaaaacaaaatactacccacaatggcttaaactgatttaaatacacttcttcatttccactctgtaagtctgaattagggagtgtgtgtaaggacactgttgcactaggcttttctggtgggaaacaggacctgtgtctgatgggtctatcacagaagaaggagcacaggatgcctgctcctctttgggcctcctccatgagcctcagttgtgcatccttggacctgcacaacttgtgatctcagtccactctgatacccgagagccccatattacctacgatagtgggccctctgatatgccactcagacacattgctatatgtttggtacacataatcagaatactaagcatgccttctccacatggcaatacctctttgtaaagatagacaaaaagcatattaaaaataagcacaagaagtgttcagactgggtttacgggtagggtcatgcaatatactgcagaggtagggggaaaattcaaagcagtgttttccaaagtaaagaaattataaacagtaataaaggttcccaaagtaaccacatatcaaaaccaaaacacaaaatttggaactggattcatttgtaagtatatcaagattctttgatactgttgagattatatcaatcattttggtagcaatgttctatgctgatcaaaatcatttgaatggtagttcaaaaatctttaaatctgagaaaaatcaattagggtttattagataatctgaattcacggaatccacaggagaaaaaataatgcaaactattaatctgaactattttgtagaaatagctacaggttactttttttatttggggcagtaattacctgacgtcttaatgaagctgcatctaccacagtcatgtcatctgaagctccttcaatggctgcatctaggtttgaaatgccatacctagcagataagatattgaaacacaagttaaaactaagagtaactgtcgagtcatgtgttgtgttgtatactacttaaaagactcatacccaacaatataaattagcatttttccatttgaattcatacaaataaggaaaagcagcttaagatgactatctgcaatactgggaaagctgaggaaaaacctcttactatgtgctttttttcaagccagaaaatgcaacaatgataacgggccctgtctgaaagaggcagaactgctactatctgacatactgacacacagcaattatatatgaaccatgtccatatgtcgttctgtaggcagagactcaatggcaggaaatgcacagtaaactacaaacaaaaactgatcatttattactctttcacttctgcctttcttttactattttttttttactttacttctgatttctagttgtctctgctctcccacaaaagtgaatacatgatcttctaaatcttttgcaactacacttaactacagaactgtctcaataatataccaacaagaagctgcatataaaacagtactgctggaaaaccaccaagacaatgtagagaaagtacattcaatagtactttttgttaaaatgcactcactcttctaaaagggcacggactcaggaatatagtggcattttagagatgggagtcttacatgactggtctcaaacttgctatgtggcagtgcatggccatctactctcgatcctcctaccttagcaccccccacaccccgcacaagtgttgggattattagcatgtactaccaagcctgcatgcagacataaaaatttaaaaagaaaaacagagaaatgttctgtcttccatttgtctaggtttctacatttttaagaaaagaacctgaaacgttatgtgtctgtgagtgtgtatctcagtgtattctacacttgtcaacaggaagccaggaaagtgcactagattaagagctgctcacatggtgttgaacttgagaactgtggatgagccataagaagtcttaactgctaagccatctctccagcaccaggtttctacattttaaaattcattttaatgaagaacacttttacctagatatagtttatacataatacaatttatttacacgtatatctactttatgttttatatggttattttagtgaaatgacatggtaacctttctacatgagcagaatgtaaataaaattccttttatgtaagctacacagggttggtacatgaatcatcattctaatactcccagtaactccacattagaaaacctacataacctgacataaagggatatgaaggagaatatatactccctcacgcttgctaatatgctgattcacaaagttctactgtttcaaatgttaaaactacctcaaaacacttttaaaaagcatgtcaagtagactttaaatactagagggcatgtacccattgtagataatccacagcaatctctgacttgcagtttctattatggctaggtcagatggcttacactaaccatgccttcctcttaagaaacaatgtgtcttgaactactcaaaataaaatttataagttaggagaaataaactcagttcataagtaaatgctggaactgtgagtttgtaaaccgagcaaattactcttataaacactaaaatagaacgtttaggtctaagggtgtagctcagtggcagaacgcttgcttacctgtgcaagtccctgggtttgtcccctgaaccataataattcagcctgcactccaaattattaaatgtttagtgaggaaactatgggtcaatgcattttcttttctatgttttatcttcaaaataataaacaatttctactttcccaagattacacatgagatgaatagttggaggaaggggttatcaaagaataccagcaattgcctcaaaggtaaacggaaggctggtgtgatactcagccagaaaatgctttccgtccaaagctgagcacctaaatttaatccccagaatccatgttaaaaatagaaaagctgggcatgctggagcattcttgtaatcccagtactggggaggcagagacaggaggattcctgtggcttgctgacaagccgacttagtgcaaccagcaagttccaggcaaagtgagagatgtctcaaaaaccaaggtggctaacactggaggactatcaaggataactattgggttttcatgtatatgcacttgtacccacacaggcaaccccaccccatcccatcatatacaaaagtaaaggaacagggatgatcatacacaccaacacacaaacatgcacagagataactagctttaacaaagaaataaagcatacatgaaaaaaattaccatttaaatactgaatcaccctgtttcaaaaacctaaagataatcttcacttgtcatatacatatgacaagattttatcatcaatttaaaacaaaaaatatgaaattagtttaaaaaatttctatttctcagaactaaaaactcttacaaatgctatcatatcactacaaacacattcacagtaagttaagagataaaaaaaaaaaaactcaagggaaactagtgtggactaaatgaagatgcagaagaaacgagtaagcagtgttcagggccaccaatgcaacatggataagattaacaagaaatgggtggctcccttttctcttacttaagaatgtgtctgcctcttctgaagaagagaaacaaggctgccaatttaaatcctgctgggacagttagcacaattctctaagcatatctgatagtatgaaaagggcaaatacaagagcaaaggctcaaatcaacaggtgataaaaaaatagttaatggacataaacaagatttaagactctatactttgttttagcatgatcctctataaagctactaaaatactgctataaagtatactggatgctcttaccacaccacagcagttttgttttgttttttttttttttttttggggtggggtggggtggggtggggtgtattgagacggggtagctctggctagtctggaactcactatgtagatcaggctggcttcaaaaatcttagcgatccacctgtttctgtctcttcagtgctaggattaaagtcatgtgccacaatacccaagcataatttttattattatacaatgttctcatactttggtggatttatgtcaggactaattatcatccctgttcttagcaaagcacatcatttcttctaagggaaagctacagaggcctaagtcgtatacataaatataatcacggctatgacatgcatcatgatgtcctgcacaatacaagctccatcaagtctgcgtgttctttggtaatcaaagtctccaaagttacctgacgttgtcatgatgaggattagaagtggcggcagctgacccaccacgcaacacaggtctagggcaggtttttgcagaagacacaagacagaatcaggaaacagagaaatacgaaaataaagcaaaaacaagacaaataaatgtcagataggattatattgtatgctttagtacaatataatatccctcaaatgctttgaaaatccttattttcttatgtcttccccattttaaataattttaacacttcataattttaaaaagagagaaaaacatgacggaatagcaccaacatatctatatggtgctatttaaaaaatgtaattcctcttttccaattgaaaaataaaaccactagcaactttaacagcatatccagacctgttagtagcacctgcatgatcatggttgctcataaatataaactaggcatttaaaggaatacccactgcccacaatcccttccctctagcttcattaatctgattagtc

SEQ ID NO: 32 - DNA, 1504 bp, Mus musculus
cagccaccctgaggaggtttctaactgaaccaggaaaaccatgacgtgctgtgaagggtggacatcctgcaatggcttcagcctgctcattctgatcctgctaggagtggttatcaattgtatacccctgggaatcagcttagtggaggcagactcgacttctcaaaaccccatctcctgctatgagtggtggtttccaggaattataggagcaggtctgatggccatcccagcaacaacaatgtccttggcagcaagaaaaagagcgtgctgcaacaataagactgggatgtttctttcatcactcttcagtgtgatcacagttgttggtgctgtgtattgcatgttggtatcactccaggctctcttggaaggacctctaatttgtaatactcaggccaacagtactgtcacttgtgaattttcattgaaaaacttaagtaaatttgatcctgaatccttcaatctgctgtggttcttcaatggcacttgtgtttctcctactgattttaaaaaccccaccatcaataacatggtcagtaactggaaaatacccaactccaactctgaagaagacagacacaggattttccacttctcagtatttatgagtctcctgcttgttggaatcctggagctcctgtttgggctcagtcagatactcattggtttccttggctgtctgtgtggcgtctctcagcgacggagtcaaattgtataaagggcaataaactagaatatcagtactttgaataatttgaaaattgcatttaaaatatatacttttgtaagttcaataatgaagcatcttctagaacacagagtcattttagtgcaaacagatgtttttagaatcatctctgaagcaactttcaaaaaaaaaattaacctatcaagctgggcagggctggtacaggccttcgatcccagcactcaggagcagaggctggaggattcagagtttgaggcctgcctagtttacaaatgccaagacagccaggactatacagagaagctaaagcagaggactggcatgaactcgcactagcgcgtcctgtatgtgcagtgcacctccactccggggggagaagttaccagtgggtgacacaggggagaagcataggaaagcttttaggtttcttttttcctatgtatgccaaaagaacaattgtccacctcatggttacagaagtatgtgtcttagttttaagaaatatatattatgtgttttgggaggaagaccatgttttaaaaatactttaccctcaaagccaaagtgatggaaaaatgctgtgtttaactgacaggcacatggcaattcatcatactctatttttttatgtttgtatctcttcatgatatctgctaagactttggggaaaaaaaatcagccttttagaagctggtttttatgtatgctgatctttaaaagataggtaacaaaatgtatttattgtattaaaatgttatgaaatagaaaaaactaaaaatctacaattttctg

SEQ ID NO: 33 - protein, 228 aa, Mus musculus
TRKTMTCCEGWTSCNGFSLLILILLGVVINCIPLGISLVEADSTSQNPISCYEWWFPGIIGAGLMAIPATTMSLAARKRACCNNKTGMFLSSLFSVITVVGAVYCMLVSLQALLEGPLICNTQANSTVTCEFSLKNLSKFDPESFNLLWFFNGTCVSPTDFKNPTINNMVSNWKIPNSNSEEDRHRIFHFSVFMSLLLVGILLFGLSQILIGFLGCLCGVSQRRSQIV

SEQ ID NO: 34 - DNA, 37262 bp, Homo sapiens
  misc_feature (1)...(37262): n = A,T,C or G
aagtaacaaaattaaaagtatttttcacatccttaagagttaactttctttaaaaaaagtcttcaaaattttttaaaattcttgaaatttaaagacataattaaaaggcaaaattcaaattataaaaaatgaacatccaagttttaaataaaattatttaaagggaactgcaatatttattgacctttaaacatgtaagtgtatttaagaaagtatattatgaaagtaaaattattaacaagtctagtgtttcatgtccatttattgccaacataaagaatcagcctatttcatgcatgctatatcgagacctacatgtaaacaaacctaagaaaaatatgaattgtttcatggtgcaaacattgctcagtgacggcatgcaatttttgtaaataccacacgagcacgtcagtacctccaacaatggggcagaatgcaatgagcaagaaactggattcttgccactacttactggaaatattttattacacaagaatattgtttagtcatgctgagaagaaggatttgacaagttaacccatcttttctcttacttaggtattttccaacaaattcttgtcacactttgaaggaatcaatccacaaacctctatggcatggagaagctggcagcccttgttttgaggtcgtggggcaagagacacgaagaagcaggtccctgagcagtaccagtcccagctgcacatatttaggcttctgggctaagctctgggtcctgagtggtgggggtggattagggcttgcgttttttacatagatttttttttttgtacgcttgtgatatgtgggatactaaagtgcacgtcccagggctgggcctagatcttgcctagatctgaggttggtactgggtgcatgaaaaactcctgtgattattattattattattatcattattatatttgagacagagtctcattctgtcacccaggctggagtgcagtggtgcgatctcggctcactgcagtctccgcctcctgggttcaagtgattctcctgcctcagcctcctgagtagctgggactacaagcgtgcgtcaccatgcccagctaaatttttgtatttttagtagagacggagtttcaccatgttagtcaggatggtctcgatctcctgactttgtgatccacccgccttggcctcccaaagtgctgggattacaggcgtgagccaccgcacctgttcactcctgtgattattgaagaatcaccaacggtggagacctccctctgtgaaggagggcccgtggcacctcggccacagctctaaaatagggctcaaggcatgacattgaaactacttgttgctcctacttgattttacttgattttacttgatgagtcctctctactgacaccatgggttgctgtggttgtggaggttgtggtggttgtggtggctgcggtggtggctgtggtggtggctgtggcagatgcaccacctgcaggtgctaccgggtgggctgctgctccagctgctgcccctgctgccgtggctgctgtggaggctgctgcagcactcccgtgatctgctgctgccgccgcacctgcagctcgtgtggctacagctgtgggaagggctgttgccagcagaagtgctgctgccagaagcaatgctgttgctaggagggaccccagcctctgggcaggtgccctttcttgggcttggatttgtagactttgtatactttcatcacctctggttcacctaaatattgagtagtggtggccaggcgccgtggctcacgcctgtaattccagcgttctaggaggccgaggcaggtggatcatttgagatcaggagttcgagaccagcctggacaacatgatgaaaccctgtctctactaaaaatactaaaattggccaggcctggtggtgaatgcctgtagtcccagctactctggaggctgaggcaggagaatcacttgaacccaggaagcggaggttgcaatgagctgagatctcaccattgcactccagcctgggcaacaagagtgaaactccatctcaaagaaaaaaatacatatatataataaatatatattttatatatatatatatatagagagagagagagagagagagagagcaagagagagcagcatgtgatttcatataaatacacctgatttagaagtcacaagcccaaattcaagtccatgctctgccacagcagtcagccacaaacaagtcagtcagcctcccagagtcttgcttattcacctataaactaataagtttgaactaagaattagtaaggagcttttcagttttaacaacatgtaaatctattgagatctattgagttcgcagaactaaactcacaggctctccagcctcacgctctgaagatttctcttatgtatcttatgcttttacatatatatacctttgctatagtgggcattaaaatttgttaacacgaaaaatcacctttaatctcatatgattcatcagttataatctgcactgcaacaaaaacaggccgtagcttacctgatgaaagttcaaaagtttacattcatgagctcagtggaatgaaataacgattactaatatattccattctttcaaaacatttactaaatgtggaaattctgtgcttatttacctgcttatattcgttgtatactatatattggctacagcttctagtgttcccttatcttcctaaatataatttaataaaacactagaaaaatattgtatttcactgtgtttgttttgatttgtttttgtcttttttgagggaggggtgagagtgatgaagctgatgtttggcaacacatattgcaaactttaggaaggttgtaagatgaaagacaagggatattcggaatttattagggtaatattagctacaacgaagcttttcttgttgctgtcaactatcctgggcagttttaggtgggcaggaggggatgaggattcgggcagctattcttcactcagttatttagggatctaggctgaagacagcactggcattttcaagatatggcttctaagatggcttagtgcgtccccagtctataggtagaaaagaaaagaacagatagcccaacacttcttaagcgctgtggcttgacagtgacacagcttgtcattggttagaagtaaccacatggtcctggccagggttggtggctcatgcctgtaatcccagcactttgggaggcggaggtgggtggatcacctgaggtcaggagttcgagcccagcttggccaacctggagaacccccatctctactaaaaaataaaaaggaattagctgggcatggtggcacgtgcctgcaaccccagctactcaggaggctgaggcaggagaattgcttgaacccgggaggcagaggttgcagtgagtcaagattgtgccactgcactccagcctgggtgacagagtgagactctgtctcaaaaaaaaaaaaaaaaaaaaaaggaagtaatcacagtaatcacatggtcttgtccagtccatagctagactgacacttccccagcaacaaccttgtcatatgaaaaggaaaagcatacatttctcatggacagttagctgtgtctaccatataaagctcacgttctagtaaaactcctagctgatttgactgcagtgtgtttagaaggggataccctgaggtaactctggtgggtgtttaattcccatttgtatcacatgaatttcccctggaagtagtgaaactggtccctgcagtagatcattcttcaaagaaaagttttttttttttttttttctttttgagatagcatctcactctgtcacccaggttggagtgcagtagtgtgattacggctcactgcaacttccgcttcccaggctcaagcaatcctcccacctcagcctctcgagtagctgggaccacagatgtgtgctaccatgcttggcttattttttgtatttttttgtagaaacagggtctcaccacattgcccaggctggtctcaaactcctgggctcaagtgattcacctgtctgggcctcccaaagtgctgggtttacaggcgtgagccaccgtgccaaacacaagtttttctaataccattaacactgttctcatttgaattaactaggtagttttgatttgttgtttaaaatgttgcatgtcattctagagttacaagcacaaacatggttcagattcttataaaaggatctagatattctagagaaagtttcctccgtaccatttaaatgagatcatagtggtggctatggtgaactctcttgctcaatagccatttccatgtccctctagtatttgctttttttccatatagcagaggctgagatgattagaaattacatggcacagaattctctgcatctgggatctggatattgcaagaattagatcaacccctgaggggtataaaaggcagaaatgaggtgaaggtcattttcctccaccttttatctgttgttgctgataaggaagattagggtggaggagttgagttttctgcactgcagcaatgttcctgggtccagatagcgtcatgcaagttaataaccagttgcagaggcagctgtagtcagctgggcacccaccaccccacccaaccaatttttgtattagctgggcgtgttggcaggtgcctataatcccagctacttgagaggctgaggcaggagaatcacttcagcccaggaggcggaggtaaattcagtgttgtagcattcaatcactaacccggggtgtgcagagtggtgatgacaacagcggcaatggttcctggaccgcagccgtactggggtgtttgtgaacttaatcgttccagagtggcttcttgatgtccccgccttttttcttgacagagtctcgctctcgttgcccaggctggagtgcagtggcgtgatcttggctcactgcaacctccgcctcccaggttcaagtgattctcctgcctcagactcccaagcagctgggattacaggcgtctgcaatcacacccggccaatttttgtatttttaatagagacggggtttcaccatgttggccaggctggtctcaaactcctaacctcaggtgatccaccccaccttggcctcccaaagtgctgggattacaggcttgagccacagtgcccagccttccctgcctttttggctactgcagagacagcggcatctcccgggccagttcagcagtcgggacctgcgaagcatttctgcagataagtctagaggctgcttttctagcccttccagcaattttgtacacatgattctcccattacatctcttcccaattccatagctagaatttcagttttctgcaactaactgacactagtctatgaaacgcccttctatcttttataccaaattctagccacgctccaaagctgtgtggaatcctggctcccagcccttcttgatggaatcttcctttttctgaactccaaggcttttgctgttttggcacgccatgtgacaagttatttgcatacttttccatccttggttttagcaacttttagttttagctcttttggttgcagaaaaatagaaacccactaaaaacaatatgaaaggataataatatagaggcatctcatagaaaacaaagacagagtctgcagtcagttttcatagggtagaaattaagacgtaaaatgccattgagaaaccaagcagtcaccctttctctaccaccctctaaagctgtgtggtctcctacctcctcttcctgcatatttctcctctctgtctctcctcctccttctgtttgtatagattggtttctctgtttctcccagcagcgttcatgaattcattgtattgtattgtatttttattatttttatttatttttctttttctacagaagggtctcactctgtcgttcaggctggagtgcagtggcatgatcatagctcactacaacctccaacttctgggctcaagcaatccttccgcctcagcctcttgagtaggtggggatttaggtatgtgccaccatacctggctaaatatttttgtggacatggggtctccaggctggtctcaaactcctcacctcagatgattctctcacctcaacctcccaaatcactgccattacaggcataagccaccgtgcctggccgttatttttattttttgtagggatggggtcttgctatgttgccctagctggtcttgaattcctggccccaagcactcctcccacctcagcctcccaagtagctgggattataggtgtgagccaccaagcctggttaagctcatgaatttaaatatggtagagacttctagttgcctacccaatacccttggtctcgttctccccagttttaactgggcacagatcacttggaataaatactacctttcccatgctgctacatggctacattctaggcaatgagatggctctttgaaagaaagagggtgagcctttctcttctttgatccttcttgttttatttattttttcttcttctcttcctttatccttctgagtggggagcagatataattgttggagctatggttgccacattttgaatgtgagaatgaagagatcagatgaagagatgcactgaaaggatctctgaggaagtggagctcccactccaactcttgagtactgtactagtctgttctcatgctgctaataaagacatacctgagactgggtaatttataaaggaaagaggtttaattgactcacagttccacaaggctggggaggtctcaggaaactttcaatcatggtggaagaggaagcaaacacattcttcttcacatggcagcagcaaggagaagaatgagcaaaagggggaaagccccttataaaaccatcagatcttgtgagaactcactcactatcaggagaacagcagcataggggtaaccacccccaagattcaattacctcccaccaggtccctcccacgacacgtgaggatcatgggaactataattcaagatgaaatttgggtggggacatgtccaaaccacatcaagtacttatcatctgactttgtgaataactttctatcttaagccatttttattttaaatttctttttgtgtgcaactaagcttaatcttaacagatacacatgccctcccatttcatgcatactggggaataactaatttctcttggtttcaattccaagctcctagagagattggaagagcatagcttctgtatctaccagtattccgatcaacaatggccaggggagcaaagttccataacacaaatggaatacagaggatctatgcatgtaagttacggggggttgtttttacagaaacaggcatgtgtgttgggcagatactaaaaagtggtcatcattctcctcttcagttataagctaattctcttttcagctttatactgaaatatcttccccttcatcacatacagattaaatttctacatttttacagaattcttcagatacttccttttagccacaaatgtaaggagtaccaaacccgagtggaactatgttatgcccactagcaaaagcatgcagcttactcagttttggtcaaatggcaaagactctggaaatcagacacttgattctcacagtcaggtggagtccaaccgatccagttccctacatataaaatgattccctaaacagttcttcaattcaacatcttatgaagacagcaaaaagatttgaaatggcacaacccacattctaaggtaagtaactaccacctcccactcattcaagtcagtaataaatatataatttatgtattgtaatatatagttatagaatgagataatttatatgacttagtgggagggtaaattttagttattaatttttataaaataaaaaatatatttttttagaatattatataattatagtagaaatctcaaccatgcagaagtatataaaccatacaatggaagtgtctcctgtctctcaacccagttgtattctttcagttattctcggtgttttgtgtgttgtgttgataggtgggtgttttttgtttttgttttaagatggagtctcactctcttgcccaggctggagttcagtggtgtgatcttggctcactgcaactactgccttctgggttcaagtgattctcctgcctcagtctcctgagtagctgggattacaagcacctgccaccacacccagctaatttttttgtatttttagtagagacagggttttgccatattggccaggctggtctcgaactcctgggctcaagtgatcctcccacctcgccctcccaaagtgctgggattacaggggtgagccaccatgcccagccaataggtgggttatttttaatccttttatacaaatcctttcatacaaaggatttcacatttcactgaggtccagtaactggaccccctagtctggagctactgttttggtgtccattaccagggatgccccttgtaccaggctgtgtgcgccccccacactgctgcagggtggagcgctgctctctaagcctactacgcctgagcttttggcccacactgactgcaccgctgcatacattatttcaccattcccaacagcactcactgaatctatgctcctgggctgagcgggggattacacagaagcagaaggaaggcgctgtagagattagagctgcctaatgtcccaatcttttctcctagacatattggtttgtatttccacccacttgaactcatgcataactgagtgacttttttggccaatgaaatgtgaacagaagtgatgtgggtcgcttctgggcagaaacatatagatccagtatgtggctcaccacatttttgtaccctgcctctgtgactgtggaagcctggatcaagaagctgcctctgccagtctaggtctaggtctaagtctaggtctttcagtaactaccatgaccccatttagatcaggatggtcagtcagcataagcaagaacttttgtattgtttttgttttttgagatggagtctccctctgtcgcccaggctggggtgcagtggtgcaatctcagctcatggcaacctccaccccccaggttcaagtgattctctggcctcagcctcccaagtagctgggatcacaggtatgtgccaccacgcttggctactttttgtttttttagtacagatgagggttttgccatgttggccagactgatctcgaactcctgacctcaggtgatcctctcgctttggcctcccaaagcactgagattacaggcgtgagccaccgcagctggccagaacttttgtattttaaagcttatgccaactgatagtcttttctcaaggagctcaccagctagtggagaggcaatgtggaaccacagtctagagatgtaaagtactgcacatggccaagtaagtgttcaagggcttaaataaaatatgataatctcctcatccaatctctctcctattgctatctttcagtctggtagcattagccaaagctctcacatgtcttaggtgggctatctctaaatgggttagtctgcaacactggaataatatgacataaacattttcttttgtgtatgtgagcatacggcttgaaataaactctaatatttgcagcagaggaaatacctttctccacatctcatatgtgttcattttcttgttgaacaatttcaaaataagaaacttccatagctggtaataatatcgatagaacaggaaaatatagtttagctggatatttttgtttttactttttagaagccatactaataaaggagtatattaaaggagcttatcgtaagcctatcttcttacataaatttatctcatagatttttttttctgctttccttccttcacctcatcataatatggaattattttctcatttcccatcatagtcatcataataatgtcctaccctattggactctgaactattttccactattcattttttattagcgttaaattttaaccagaagattgggataaaaggcaacatagtaccatgcaagcatagccactttgacaacgtttctgagccaggggtgaccatgacctgctgcgaaggatggacatcctgcaatggattcagcctgctggttctactgctgttaggagtagttctcaatgcgatacctctaattgtcagcttagttgaggaagaccaattttctcaaaaccccatctcttgctttgagtggtggttcccaggaattataggagcaggtctgatggtgagtgatatttatttgacttgatgtgaagaagggcctgcctatttcaccaaaatcctaaaagctgtcttccagtcttgcagttaactatgtcttggcttatgataaaatttggagcagtagtatggcattaatttatattggtcatcagtgaagaatggtaatttaaataaagtacactatgtggtataggatagagagctgggcaaaaaaataaattaattagtagaagttggctgggttattatctctcacatttctgtacaggtagggctgctctttcaagctttgtggttagagttagggaccttctgaattaattccttcaactttccattgctccataccagtctctaagtatttacagaaaatgcaataggagtgacaggttgcttaatagggatgagtagaaacattcccatgtatgatgactagcctgggtgatggtaattacgaggcatgaatgctgcattgcctgtacctgaagggagttgggctaagagacatggacttaaaatcctgggtctctggcctcaaggaatttttgactcagctattatatagatcctaggacatcgagcttgttgaatagtttggtgattgttactaggtctacctctgttgaaatctgcagcagagcagtgcaggatggaactcctaaatataactgacatgaatcacccgaggcacttgcaatagttagatttacggattttctcctgagaattctgggtgcagtaggcctgggtaggacgcatttgtatagggaaaacggctttcaaatatggcagaatacctcagctatggttctgcctcccatataccactgcaagcaaatcatttatcctatggttttgtttccatatgtgtaaaatggggatgtggatgttgaagttgataattcagcatccaagaggcttgtttttgtttgttatgccactagggggtttagttagtgccaaataaatgaatgtgtgtgtgtgcctgtgtgtgtgtgtgtgtaagacagagagagagagagagagtaagctgtaaggactgatattatcagtgttttagagataataaaacacggaggtgacttttttttaacttttttttttaagttttcagttcagaggtacatgtgcaggtttgttacataggtaaacgtgtatcttgggggctggttgtacagattatttcgtcatccagatattaagcctactacccattatttattttgcctgatcctctccctcctcccaccctccactctccaccctccaacaggcaccagtgtgtgttgttcccttttatgtgctcatgtgttctcatcatttacctcccgcttacaagtgagaacatgcggtttttggttttctgttcatgcgttagtttaaggataatggcctccagctccatccatgtccctgcaaaggtcatgatctcattccttttttatggctgtggaggtgatttttaaagaaattcaggacatagttttctacttgaatcactgattctgaattatgatcagttactgctgctggtattatccccagatttacaaaaacactcttcctttaccatcacaaagaatctgttcctctgctttaggtagaaagatctaattaaagaaaaagcttttggaaagttttgggctatttcttcacactgccatgaatgctctcttccaggctgagagacagaaaacacattgcaactcaacagcatgaagcaactgtacatccgtgtgtctgttttcttccctgtagaaggcttctctctgcttgagtagtagaagcctcttttgcatttgcttacaccagaagccaggagcagctggctgagcatgacttaacgatagcaatttccatgaagctcctagaagttcctgagttaagacaatccacttagaataacacatgcagctttagatataaattggctctgccacaaatcccatgagattaaaaaaaatgtattagcattaaaggagtcggaggtggcgatgacacatacctacatctcctgtattcttcattttaggatggtggcgggtgtggcagggagagaagagaaagagaaaggcagagacagacagaaggacataagtgctcatttattggccgtctgccaaaggccagctactgggttcatacattaccttgttatctcatttagtctctataataatgtgtgcatttattatcacttgaattttataggccagcagatagaaagttaggaatgttaacaaggtcacctaatggatgtgaaattccagatttatctgacgtcaaaactctgtttttccaccagtgctagtaccgtagtcctcaacacctgtctcagggctgccagaggtgaaagatataatctataaattaatccataaagtcaagtgaccaggaaactgagtcacagaaagattatagaaactcgtggaacagtttcagagaatctgaacttcctcgttctacagctaagtttactttatcaccctcagtaagtattatcaaagatataaacaccagactatctctattattctgtattatagaatgtcattaaagcatcagacaactctttgaaaagtccaatatgaactttatagacagaggctatgcccacaagcaaacaggtgggtggtaaaaagggctcagactacaggtatattttcatgatcctcagatagatagagaatgtggaagaaagtgtttttcaaaggaatttattaatatgtcctttataatatccatgaaaatactcactagttcaaaatactgagctttcaatatactagtaactacacaaaaaagttaatagagaagaaatcactgcctgtgataagcactttggtcatagttcttgaaatctttccagaattactgtagtgtttcaaattagtattgttaccaaaaatgggattttgcaggaagtagataattatacaaactatggaattcattattgattacatcatgaaatatattcattttatggcttcatgacttacttaaaacggaggcggacttttcatcttctaaaaccatgactaagtaaaaatgtgatgtacttaattatctttaactttaaatggaaaaatcaatacaaatgttatttgttcgagtatttttnnnnnnnnnnnnnnnnnnnnnnnnnnnnnnnnnnnnnnnnnnnnnnnnnnnnnnnnnnnnnnnnnnnnnnnnnnnnnnnnnnnnnnnnnnnnnnnnnnnnnnnnnnnnnnnnnnnnnnnnnnnnnnnnnnnnnnnnnnnnnnnnnnnnnnnnnnnnnnnnnnnnnnnnnnnnnnnnnnnnnnnnnnnnnnnnnnnnnnnnnnnnnnnnnnnnnnnnnnnnnnnnnnnnnnnnnnnnnnnnnnnnnnnnnnnnnnnnnnnnnnnnnnnnnnnnnnnnnnnnnnnnnnnnnnnnnnnnnnnnnnnnnnnnnnnnnnnnnnnnnnnnnnnnnnnnnnnnnnnnnnnnnnnnnnnnnnnnnnnnnnnnnnnnnnnnnnnnnnnnnnnnnnnnnnnnnnnnnnnnnnnnnnnnnnnnnnnnnnnnnnnnnnnnnnnnnnnnnnnnnnnnnnnnnnnnnnnnnnnnnnnnnnnnnnnnnnnnnnnnnnnnnnnnnnnnnnnnnnnnnnnnnnnnnnnnnnnnnnnnnnnnnnnnnnnnnnnnnnnnnnnnnnnnnnnnnnnnnnnnnnnnnnnnnnnnnnnnnnnnnnnnnnnnnnnnnnnnnnnnnnnnnnnnnnnnnnnnnnnnnnnnnnnnnnnnnnnnnnnnnnnnnnnnnnnnnnnnnnnnnnnnnnnnnnnnnnnnnnnnnnnnnnnnnnnnnnnnnnnnnnnnnnnnnnnnnnnnnnnnnnnnnnnnnnnnnnnnnnnnnnnnnnnnnnnnnnnnnnnnnnnnnnnnnnnnnnnnnnnnnnnnnnnnnnnnnnnnnnnnnnnnnnnnnnnnnnnnnnnnnngcatggtggtgcatgcctgtaatcccagctactcgggaggctgaggcaggagaatcacttgtacccagaggcaggagttgcagagagccgagattgtgccactgcactccagcctaggtgacagagtgagactctgtctcaaaattttttttttttttttttgtagatagggtctcactatattgcccaggttggggtcaaactcctgggttcaagcaagcctcctgtcttggcctcccgaagtgccagaattacaggcatgagccaccatgcctggctgcaaaatatagttttgatatttgtaatgagctatgactttgtgtgttactctcatgttcaagttcttagaggactcccaaaagtctgaatttcatcacaggatttttaatggtctgaagtttttccacacttcatttgtaaaatcatgtaacttctcaaactaaatacaattagggggctctgtaagaaaaaatcaacaatattactttcctttttaaaaacaaaagactagcaagacttttaattttacaaaaactcaggcattcaaatatgcttaggaaatgaagagaaagtgtgttctcataattactcattttggcaggagattatctggaaaatttatatataattcatacacacacacacacacaccattcacagttttagtgtctgtctaaagagcccctccaatttccggagctctgaatgggaaagcggttgaaaccgcagcgagttgtcaaatcaccagtaacagcattacaaagatgtgttaatacgccttgaagtcggtggggtggtgacttatacactgtaagtaattgtccctttataaaacccctttgtaagtgaatcatgaaaggaaatatttagtaactctgaaataaacttatcttcaagaaagttaccagagttcagtttgcatcaacaaggaaaatagaacaatttatccatttaagttgtaatgtcaatccacttttttttttttttttttttttttttagacagggtctcactttgtcatctaggctggagtacacttgcactttcttttaaaagaatcattaattttctaaatctgtagctggcaaactgtaaatattcagccaatattttaggtttataaaccagcctcttccacatattttttttttttttttttgagacggagtctcgctctgtcaccaggctggagtgcagtggcgcgatctcggctcactgcaacctctgcctcccgcgttcaagcgagtcctctgcctcaggctccctggtagctgggactacaggcacgtgccaccaagcccggctaattttttgtattttagtagagatggggtttcaccatgttggccaggatggtctcgatctcctgatctcgtgacccgcccaccttggcttcctgaagtgctgggattacagacgtgagccaccgcgcccggcctcttccacacaatttaactctactcttggtgcacaaaagtagccatagacaatatgtaaatacatggatgtgactgtgttccaataaaactttatttacaagaaagaggtggtgggccatagtttgccagttcccgttctaaatgatttgtcctgtaagctcaaaaggcagtacagcttatgtgtacaataaaagatgtttagtgcacgaatactgatacctatttgggagctaaaatttcttttcccttttcttctgggctttcagctatgcgccaaggtggctaggcagccatatacacatgtggcctctaaataaggagggtggtggtgttcaaggcaatgtgtaagcaaagcttgataataatacaaagtgacatggaggcagtacatcatcagatggagtgaggtttgttaggaaagctgccttgtaaagaggcataaactttaaacccgtgctaaaagaataaaggcagatgtggccttggataaatgaatcagagtgggagtaactggaaggacaatgagatgggcaagggtgaaggcagcagggaagatgagaatgaacaaactctaggtaggaataggggagaattgtaagacttgagtcagtgtggaatagggattaagagtcccggctgagcacagaggctcacctgtaatctcaatgctttaggaggccgaggcgatcacttgagcccaggagttcgagaccagcctgggcaacatggcaaaatccccgtctctacaaaaaaatgccccccagaataaattaaaactaacagggcgtgatggcatgcatctgtagtcccaacgactcgggaggctgaggtgggaggatcacttgagccctgggtgttgaggctgcagtgaaccgtgatcatgccaccgcacttcagcctgggtgacagagtgagaccctgtctcaaaaaaacaaaacaaaacaaaaaactatgtgggctctgcaccccaaatgactagctttttttgttgttgttgtttgtttttttgagatagagtctcgctctgtcgccaggccggagtgcagtcacgtgatctcagctaactgcaacctctgtctcccaggttcaagtaattctgcctcagcttcctgagtagctggggctacaggtgtgcaccacctcgcccagctaatttttgtatttttagtagagacggggtttcctcatgttggccaggctggtctcgatctcctgacctcgtgatccacccacctcggcctcctaaagtgctgggattacagacatgagccaccgcgcccggccaaatgactagttttgaatcccaacccttctaccaagaaagtagaaggacaatttgagtaatttgtcctttctatgcctcagttttctcattggtaaaatgggaataataatagcacctacctcataggattattatgaggatggaataaactaaggcgtgtaaagtgcctgtaacagagtctggcattcgccagagctcgggaaaatgttagagaatgagagtagaaggagagagaaaaaccactcaagggcagctgtgctgagatggcaaaaaaacctacgcctaaaatttctcaagcggaaggaaataattacattccacccttcaatgatacaaaactccttccagtaagaatttctagtcgtagctgctgcctagatatactaaaaattgaaacccaagtcctgagaatatggtgttctttcttacagctttccttggcaacgtgtatttccctgaaggcagaatgcgatctatagatttctgagcatcaatatataaagtgagatcattacatatcatggatataggaagagaaaggagaacgtggaaccaaaaataattctcaaatataagtttggggaaaccagcaagatagccgggatcctgggaaaagaaaggctagtgggagtgggtggtgacagaatgatttgttcccaactgccaggcaaacaaaaccatcaatttcttttctgcaggtttgccagaataatccatacaatttctgggaaatcgggccaggcgtaatggctcacatctttagttttcttggcaggaggttttcttgaggccaggagttcaggaccagtctgggcaacagagtgagatcttgcttctacaaaaatatttttaaaattagccaggtgtggtggtctacacctgtggtcctagctactcaggaggctaaggcaggaggattatttgagcccaggagttcaaggctacagtgagctatgctcgtatcactgcactatggcctgggtaagagagtgagacccctactctttaaacaaacaaacaacagagtttggatgatgcagccaattctttcagaaacatttcttccaaaaataatgtataaataagtcatcctaatctatttaaaatccaattctctgcagatgactcagagtgaactaagaatgtagatagaagacttcaaaactcctgtcttgaattcccctgttcccgccgccacttttaatctttctggttgaaactgggatgacaaggttcacaaaaccacggatattgccaaattccctttttgttctttgagccttgatttcccacaactggtggtaaacggaaggtgaagattactattttttcttctgatgagaagttataatactcatctttcctgttgatgtcatttccaggccattccagcaacaacaatgtccttgacagcaagaaaaagagcgtgctgcaacaacagaactggagtaagtatgaagcagtcggcgtggaagcagaagtgcatgaacagttattgctacctaagcaaagccacactgagtcactcgcatctaccgaatcacagtggggctccactgacagagccacagccttagaaacatgctatttttatttatttatttagagacagggtcttgctctgttgctgagactggagtgcagtggtgcgatctcggttcactgaaacttctgcctcccgggatcaagcaattctcctgcctcagcctcctgaatagctgggactacaggtgcacaccatcacgcccagctaatttttgtatttttagtagagatgggggtttcaacatgttggtcaggctggtctcaaactcctgacctcgagtgatctgctcgcctcggcctcccaaagtgctgggattacaggtttgagccactgcgcctggcctgaaacatgctatttaggatgattatatagaagtagaaaaagtgagacgggtttttttgtcccacaaacatttagagttggccttctgtcccttcctcagtcttccgtggattgtcctttcctcaatctaaaggttttcaaagaaaggagattggtaagtcacgcccacagctgcaatcaatttcataatactcgggtgtgatatttttgtggcgtatataaaatactcagggaaaatgtactcagttctctcatgcaatgacagactggtttgctaggattagaatgacaattgcctttatccagttaaattaaaggagctgccaggtttttttcccccaaaacatttaatgcctacccactatgtataaagtcgtaacgaagttaaaagtaaattaagattcattaaccggagtgtcactctgctcagaacactttcagagatgctgtttcatttaattactactcaaaacccttaagtgggaaaaagtaagaagtgtgtttgattgacgaaggaaggacgtcagagaaagtannnnnnnnnnnnnnnnnnnnnnnnnnnnnnnnnnnnnnnnnnnnnnnnnnnnnnnnnnnnnnnnnnnnnnnnnnnnnnnnnnnnnnnnnnnnnnnnnnnnnnnnnnnnnnnnnnnnnnnnnnnnnnnnnnnnnnnnnnnnnnnnnnnnnnnnnnnnnnnnnnnnnnnnnnnnnnnnnnnnnnnnnnnnnnnnnnnnnnnnnnnnnnnnnnnnnnnnnnnnnnnnnnnnnnnnnnnnnnnnnnnnnnnnnnnnnnnnnnnnnnnnnnnnnnnnnnnnnnnnnnnnnnnnnnnnnnnnnnnnnnnnnnnnnnnnnnnnnnnnnnnnnnnnnnnnnnnnnnnnnnnnnnnnnnnnnnnnnnnnnnnnnnnnnnnnnnnnnnnnnnnnnnnnnnnnnnnnnnnnnnnnnnnnnnnnnnnnnnnnnnnnnnnnnnnnnnnnnnnnnnnnnnnnnnnnnnnnnnnnnnnnnnnnnnnnnnnnnnnnnnnnnnnnnnnnnnnnnnnnnnnnnnnnnnnnnnnnnnnnnnnnnnnnnnnnnnnnnnnnnnnnnnnnnnnnnnnnnnnnnnnnnnnnnnnnnnnnnnnnnnnnnnnnnnnnnnnnnnnnnnnnnnnnnnnnnnnnnnnnnnnnnnnnnnnnnnnnnnnnnnnnnnnnnnnnnnnnnnnnnnnnnnnnnnnnnnnnnnnnnnnnnnnnnnnnnnnnnnnnnnnnnnnnnnnnnnnnnnnnnnnnnnnnnnnnnnnnnnnnnnnnnnnnnnnnnnnnnnnnnnnnnnnnnnnnnnnnnnnnnnnnnnnnnnnnnnnnnnnnnnnnnnnnnnnnnnnnnnnnnnnnnnnnnnnnnnnnnnnnnnnnnnnnnnnnnnnnnnnnnnnnnnnnnnnnnnnnnnnnnnnnnnnnnnnnnnnnnnnnnnnnnnnnnnnnnnnnnnnnnnnnnnnnnnnnnnnnnnnnnnnnnnnnnnnnnnnnnnnnnnnnnnnnnnnnnnnnnnnnnnnnnnnnnnnnnnnnnnnnnnnnnnnnnnnnnnnnnnnnnnnnnnnnnnnnnnnnnnnnnnnnnnnnnnnnnnnnnnnnnnnnnnnnnnnnnnnnnnnnnnnnnnnnnnnnnnnnnnnnnnnnnnnnnnnnnnnnnnnnnnnnnnnnnnnnnnnnnnnnnnnnnnnnnnnnnnnnnnnnnnnnnnnnnnnnnnnnnnnnnnnnnnnnnnnnnnnnnnnnnnnnnnnnnnnnnnnnnnnnnnnnnnnnnnnnnnnnnnnnnnnnnnnnnnnnnnnnnnnnnnnnnnnnnnnnnnnnnnnnnnnnnnnnnnnnnnnnnnnnnnnnnnnnnnnnnnnnnnnnnnnnnnnnnnnnnnnnnnnnnnnnnnnnnnnnnnnnnnnnnnnnnnnnnnnnnnnnnnnnnnnnnnnnnnnnnnnnnnnnnnnnnnnnnnnnnnnnnnnnnnnnnnnnnnnnnnnnnnnnnnnnnnnnnnnnnnnnnnnnnnnnnnnnnnnnnnnnnnnnnnnnnnnnnnnnnnnnnnnnnnnnnnnnnnnnnnnnnnnnnnnnnnnnnnnnnnnnnnnnnnnnnnnnnnnnnnnnnnnnnnnnnnnnnnnnnnnnnnnnnnnnnnnnnnnnnnnnnnnnnnnnnnnnnnnnnnnnnnnnnnnnnnnnnnnnnnnnnnnnnnnnnnnnnnnnnnnnnnnnnnnnnnnnnnnnnnnnnnnnnnnnnnnnnnnnnnnnnnnnnnnnnnnnnnnnnnnnnnnnnnnnnnnnnnnnnnnnnnnnnnnnnnnnnnnnnnnnnnnnnnnnnnnnnnnnnnnnnnnnnnnnnnnnnnnnnnnnnnnnnnnnnnnnnnnnnnnnnnnnnnnnnnnnnnnnnnnnnnnnnnnnnnnnnnnnnnnnnnnnnnnnnnnnnnnnnnnnnnnnnnnnnnnnnnnnnnnnnnnnnnnnnnnnnnnnnnnnnaaaaatacaaaaaattagccgggcgtggtggcgggtgcctgtagtcccagctactcaggaggctgaggcaggagaatggcgtgaacccgggaggcggagcttgcagtgagccgagatcatgccactgcactccagcctgggcgacacagcgagactccgtctccaaaaaaaaaaaaaaaaaaaaatagatggttaaaaataaacaccatggcacttcttgatgagtacatttaagtaactgcacaagtcacagtagcatggaagaatcaggatttgaagtagactccaaatccatcattctgaacttttggctggaagaagaatagtgattaaagtgtttcccagctgtgagagcctgacaagttttgtccatctccatgatacacagttttctcatctataaaatggaaataataatagtatgctacctcttgggattatgaaaagaattaaatgagatgatatatgtagagcacaacatccctcaacacaactctataggtagccaccttattctgcactcataaaaggcaggtctcaagaacacaacacacagaccctgtgggagctgcattatcccagcaaagaaaaaggaaaagcattccctcgcttcatttctgctgattttgaaataatcatcagtgactaacaacttcactgaaacaatacaaaagtttccttcttttttttttcttttagagatgggctcttactacgttgcccaggctagtctcgaactcctgggctcaagcaatctaccctccttggcctcccaaagtgctgggactacaggcatgagccactgtgcctggcctaagagcttatttttggaaaaacaaacacgaactttcattcagtttcctatgccaaattccatgccttcttctgctctcatgactgactcacgaaataaagatgtgtacaatctttctaacacagtggctctcaaccggcgggttattttacccacccacctccaccccaagaggatatttggcaatgcctggagacatttttggttgtcagaaccgggctggaggtggcaaggcgtcgggggatgatattggcatctagtgggtagagatgagtgatgttgctaaatatcctacactgcacaggaaaggccccacagcgaagtgtgcaaatgtcattggtgctgaggttgggaagtcctgttctaactctatgctgttgactgatcactgtgggatgctggccactggccacttaaagcatcagggccaaattcacttaaagcatcagggccaaacgcttgcgagccaagagaccagacatgaagataaacgtagttaagatccagtcaagattctatgaagtaggaagtacataaaacagggaggaactagatctcagtggtcagaagaaacagatgagactcaggaatatgaaagttgagattttccagagacagtgacaagccaaaccatctttttttttttttttttttttttttgacagagtcttgctctgtcacccagcaggagtgcaatggcacgatctcggatgactgcctcccgggttcaagcgattctcctgccttagcctcccaagtagctgggatcacaggcatccaccaccaagcctggctaagtttttgtatttttagtagagagggggttttgccatgttggccaggctggtcttgaactcctgacctcaggtgatccacccaccttggcctcccacagtgctgagattacaggtgtgagccaccatgcccagccccaaccatcttttattgagtgtaatcaaatagcagagactgccctctgcctttttgtatcattcacacctaataaactgtgatcttaagatccaggattttagggcgactggatttaaaaaagactgtatacgctcctgaagcttgaaacagatcaagaacatgtcataacatgtgcaaatggctctattttatttttcagatgtttctttcatcacttttcagtgtgatcacagtcattggtgctctgtattgcatgctgatatccatccaggctctcttaaaaggtcctctcatgtgtaattctccaagcaacagtaatgccaattgtgaattttcattgaaaaacatcaggtaagtaacttgattttcacaggcttactgtctcacacagttgaactagtttgattagattaatgcagtactggaacaatgccatgtttttatttgatgcaactgccgggacaaacggattcttaggaattttagtacattaacgccagttagcacaactccacatcaaaatggaggaatcattagatttacaatgctctaaaaggacttttagatattgtctaaaaggactagttgatctcaaatggcttatgcttgtctttcaaaaatctacagttacatatgtgtatgtatattaaaaaattatgcaaatatacaccagaaacttaactttcatccttggagaatggaaataggggattccctttatgagagtgaagagaacatttactttctacacttctgaactaattaaatttgtcaaccatgagcaaatattacatttacaatttaaaaaatttaataaaaacacaataaataaaatgcagagccttgcctgtaggcttaaatggaagagcaaccaatggattcatacagatatgctataaatatactgtatgcatgggaatgaatccaaattttaagtcatgtaataacaagtaatactggagagttacatgtacttaataagtggctcattttagtcttttaagtacatcattctgtgactgaatctagacacaatttgtaaaaactggaagaaaaaaactatctaatccattacctctctgtatagcctgctcagtttagcaaataaccagaatttacttttgtagttacatacaaaaaattttttctccttttcccttaccttgctacattaaaaaagaaagtccctcaaattttgtgtagcatatttgttttgaaccaaaacccaaggaaggccaggcacagcggctcacgcctgtaatcccagcactttgggagaccaaggcaggtggatcgcttgaggtcaggagtttgagatcagcctggtcaacatggtgaaactgcatcactactgaaaatacaaaaatgagccaggcgtggtggcacgcgcctctagtcccagctactcaggaggctgaggcgggagaattgctggaacccaggaggcggaggttgcagtgagccaagatcaagccactgcactccagtctgggtgacagagtgagactgtgtctcaaaaacaaagccaaggaaagtctccttactaatagacttgaagtaaagggttaaagatttctaccacagatgctatgcacattaaatccccagggaatgacaacagcccacaatgtaccaggcaccaggctacgctctgcagacaacagcgctcagatattctcagcctagttgcggagatgggctaggctagcaaagttacaagagagtgatccttggcttgctacacatttcacaaaacactcatattccatgtgctgaaaatactgttgttttcccaggttgaatgtcagttgctgatatccagcaatgcaaactccctaagaacattccattttactctacagtaaacaaacaaaaaatcatcttgagatagatgtattagggctaaaagtttctcattttccacagccccgttaagaacaggcacatcactttaatcagacatatttaatcagtaaaaactgtacatctggttgaagaacggacgccacgctgtagttctgcactaagaactgagctcatttaatgggggtggcggggggtaggggaggctccttagtttttatatctagcaagtagaagagtatctgaataaataaaataaataggttgaaccacgaaaaactgttgacattcaactatttctgacatcccaaaacagcagtttcataccgttcaacctaagagaagatgtaccatagagatgcttgttaaatgatgggctatataagtaataaaagttttgtaactagtagagtatatggacacatgctcagaaaccctgatctctgtcatttctgggcacgatatttcaaaagtacattcgtttcactcattcttttatgtgcacaatgctactttcctttggtcagggatatttctgaatatctgatttttatcttttgtttttcagtgacattcatccagaatccttcaacttgcagtggtttttcaatgactcttgtgcacctcctactggtttcaataaacccaccagtaacgacaccatggcgagtggctggagagcatctagtttccacttcgattctgaagaaaacaaacataggcttatccacttctcagtatttttaggtctattgcttgttggaattctggaggtcctgtttgggctcagtcagatagtcatcggtttccttggctgtctgtgtggagtctctaagcgaagaagtcaaattgtgtagtttaatgggaataaaatgtaagtatcagtagtttgaattaatttgagaagtacacttgttttcaaagtcatctttgagatgatttaaaaaatcaacccttcacgtagaaagcacgttgtaaatgcataacactctcatatcagtggttgatttgggaaaggtggagagaattttcaattagttttgtgttgtactattcaaattttttacctcttcactgtgtgtagagaaaggagaagggaaggaggatgagaaggaacggaagtcatcctgaaaataaaagtacaggactttttttttttttttttgagacagggtctcaaaaaaggctggagtacagtagtacagtggtgctatctcagcttactgcagcctcaacctcctgggctcaggtgattctcccatctcagcctccctagtagctgggactacaggtgcgtgccactatgccaagctaatttttgtatttttagtagagatgggggttttccatattgcccaggctggtcccgaactcacggactcaagtgatctgcctgcctcagcctcctaaagtgctgcaattacaggcatgagccatcgcgcctaaaggacaggacctttttattgtatttctttaaagaataaatacataacctgaatgcaatcaagtctttagatctaattctcagcttgcagggaacactaggacaaatccaaaaagtgggtcagcgggcacagaatggcccaattttcaacaggaaaatgttataaaagaaaaatatttttgagggaactgttatagattaagagaatagaggcatgtttcagctaaacacatgtaaactttgtcagagataattgggaggagtatgtagaagaatcggattattgttaattttggtaggtctgataatggttttatagtataaaggctgagtaccccttatccaaaatgattaagatcagaagtgttttggctttcacatttttttggattttggaattttgcctataataatgagacatcttggggatgggatgcaagtctaaccacaaaattcatttatgtctcatacacactttgaacacctggcctgaaggtaatttcacacaatattttaaataactttgtgcatgaaacacaattttgactgcattttgactgcaactcatcacatgaggtcaggtatggaattttccacttgtggtgttacgttactggctcaaaaagttttggatctcggagcattctggattttgaatttttggattagtgatgctcaacctgtatacagaaatgtcctcatttttaaaaaaagaaatgcatatttatatgttttaaaattacttcaaccaaaagcaacggggagatgtttactgttatatttaggtgacaggtacatggcaattcattataccctcctattttcctatgtttacattattcattaattaaaaaacaatacctagaaaaacccaagactttcaaaagctattttctatatgtgccaatctttaaaaaacaggataacaagggtatttatcacattaaaatgttgtaaaacagcaaagctaaaaatctaaaattttctgaatgttatttctatatttcaattgtttatgttcattgggcttaaggttccagaaataatttgcagtacctacattatagctgcctaaataaatttagtaacatcaagagcttataagccttttttctgaacatttactatataaaaacattcttcctacacccctacaaatacttacttgtccttaaggcctagcttaagtatctcctacttgaggaagccttcccagtgctcatgatccaataaaccaagtcagcacttacccaagcctctattatcattcctgtcataatgtaacatacatgtgtttgtacgtccatcactatagtattcaggagcacaggaaccatgttcatcagccctcacctcttcaggtccttagcaacgcctctcatttccccacctccagccccattcctacccccacctgccttatctctggcagcactctttatccttgacttcagcacaaataccactttttctgagaggctattcctaaacgtctaatgaaaactaggtttccctttactcttttaccatgctttcatttacagcatttatcacaatgatgattgcattttcctttgtgcttgcttcttaaatttcactgtcccccattagactataagctccaggggtacaggaacatgtttattccctcctggtataaagagtacttagtacagtgcctggtacaaagcagaaacattgcatttagttgaatgaattaatgaatcctatcttcagtactcagcttttagcgaagactcgatacttactcaatgaactgtcaaactgctaatggtcatgtaattaaaacaaaaataagacagctcactgtactctagtgaacaagggtcagcaatggtgcttacaaattttctcatcaccccccaaaatatttatgccatgtactttccccaaaatgtgacttcattaattcagccagtgaccagagtatccttacatcaatgagtaaatataaaaactttattggaatagcatgttagcagcagtgaacagggcatggcacagaaggtttccaaaacaagtttagcatgaaggatgccatatgctgttgccaacaactagaacacggtgactaaagacacagttctgaatgtccagcacaacctctggcctgcaactatgttcagtgatgatgataaacaaggtggtgacttggaaggaatccctatgtcaagtgagaaaaaaaaatgatgtctgacctccttatatatgtaaaaaatataccttcagagtccgtcagtaagctggaagaagtggatgttgaagtttttaacatcgatgatgggtctccagttgttcatcaacccatggtgaaatagctgaacggttctgaatcaaaggtgatcctaatagtgaagacattaacattgcagaaaaagtgcctacagattatatggtgaaaatacgtgatgggcttcttgaaggactagagcagtgtgtattcaaaacagaacaagaaatcacgtcagtttataaaagcaaagagaggtttctcagacaaaaacattgttcatgaggtagatgactctggaagaaatactttaaaaagccactgagaagaatgcctcgtctccacaggatccacttcctagcctctcaactgcttctcatgtttcttctcactgaaaaaaatagtgtccagtaatctttactccaacagtaccgccagtggggacaggaaacttgccgtggctgttcttggttgtggctgttgtctaacagctggtgcagtatctggtgatgcccctgtgctgcttagttacttgaacgcagttttttcactgtattaatagtgtgtcattttttaatgttaagtatttatgtgtgaaaaagtgttaagaaaaaatgactgtttattggcagcatatacactcagagtcaggaatgatagtgatggcaaaaaacccgactgtccacatgcgtggctgagatatcactatgacatctttgctttttgctttctgatggttcagcatacacaaactttgtttcatacacaaaatttgaaatattgtataaaattatctttaggttatgtgtagagggtatgtatgaaatataaatgaatttcatgtttagacttgggtcccatcctcaagatatctcattatgtatatgtaaatacttgaaaatctgaaaaactctgaaattcaaaatacttctggtccaaagaattttggataagggctgggcaatcactatagttaaggagctggaaacacacattcatgcaggaaggaaggaaaaaggaaagctctcttgaaaatatactacttccatgatgttatccttcaaagtgtaaacaacctgcacatacttcaaccataattactagaagtggggagaagggtgcactttcagtagtgcaacaatatatttgctatacttagttgtatgatacgactttggctcctgactgtatccatttctccatctatcatctgcacctggaatattttcttgttctttctctgcttgttgaaaggctcagctcaaatatctggttatactaaccaggaactaatttgttcttctcaactccaaaatatatttcaacagtaattaacaatttttaggggaagtacacaggtgtttaatagagatcctaactttggagttagagagattcaagcttttctacttctagatatgtgacaaggtcaggtaaggcaggtttcttggttgtccccttttgcactgtaaacagagttttcattcaccgtctgttggggtcttagcttcattcacgagtctcctgttacagctggtgcctgcctgaggtagggaagtcgatcttctaccccttgcacaatcattaagggagaaagctccaagtgtccattctttggtaagaatcatgagggaaaaaaagggcttccgcacttctctctcagtattcctgcttttatttcattttttgacctttgtggaatccttttcatgtctgtttatcaaaagatactaaccttatccatcatttttcttcatttttgtgatttcaatttggaggataaccacagaaattaccttctggtatacataaatctagaattaatatagttgcatcattaccaaaagtcagaaaacttctaagtacagagaagaatctttgtcttgatattattttagagggataagaagcaagaacggaaatgctaaatctaactctatccaaggaatttcctcaactgcctttccccaaactccctgccttggaagaaagataccaaagatgtgtggagaatgttgcacctaactgaattctacccatttctgaaccgaaaatggggaaatataagttttgagagctaaaactgtctagcacttggcttcacttggtttaattcttttgagatttacttttaaatttttagtttttttttgagacggagtttggctctgtcactcaggctggagtacagtggcatgatctcagcttactgcaacctctgccttctgggttcaagtgattcttctgcctcagcctcctgagtagctgggattacagctattgccaccatgcctgccaccacacctggctaatttttgtatttttggtagagatggggtttcactgtattggccaggctggtctcgaactcctgactcaagtgatccacccgcctaggcctgcccaaagtattagnnnnnnnnnnnnnnnnnnnnnnnnnnnnnnnnnnnnnnnnnnnnnnnnnnnnnnnnnnnnnnnnnnnnnnnnnnnnnnnnnnnnnnncaggcagaccacctgaggtcaggagttcgagaccagcctggccaacatggcgaaaccctgtatctactaaaaatacaaaaattagttgggtgtggtggccagcgcctgtaatcccagctactctggaggctgaggcagaaggatcacttgaacctgggaggtggaggttgcagtgagctgagatcatgccacgggactccagcatcagcaacagagcgagactccatctcaaaaaaaaaaaagtatacacaactcaaggtatttaaacctgaaccactttatagatattataaattagaaaaccacctacaatgcaaccaacagccaccaccaccaggatgaaggtctgaaaggaagcacagcaggttcttgctacctaccaggtcattaattgtattacttgctctgagacgggaagactcataaggtaatatgatacaaaatgtagctgattgcacaaatgatgaaataaaatccttcaacagacaaatacttctttggttgacagtttattaaatacactacatttgtaccttattctgtcgttttttaaattgttcacgcatgaactgagtaaaaacgtactttatagaaaaccaagtgcaaaactaaaatgaaagaatgcacatattgcacacatatgaaactgctgcaatgttagaaattaatctgtacaagtacctaatgaagaaggttatgaaatattaggtggttcgagtttcttaaatctggcaccagaccatgactttgaaagtgttaatgttgaagtgtcgatgcaaaaatgtctattaacaaaactgcttaacactgtttgagaaacaggacaaaataattgtttttctttcacagacacttttctgaatcaattctctacagactctctcccattcagaatcagttgggtggactgatgaggcaaaaaataaattccttttaaaaaacaaaactggagcctatttacaaaacatgcaaagggagaattttaagcaggtgttactgcagaactgctcagacgtgaatacagctgagtgacagaatatacctttacttctacaaatataggtccttcctccagactttctggaagaaatacattttcagggtgtggactataaaatggcatacaatgcagagacagaaacaaagaagtttgcaaatcttttatatttccagctgttgagacagtatttttgagggctgatgttacctctagcggcgaaaccagagccagctattaagcagccagaaagctacagtaattgaatacatgaccatttctcttttagcacgttctttgttctcctcttccagaagttgtagacgtctatttagtttgattatctaagtgaaaaacaaacacacaaaaaatataatatagaggctttaatgaatagggcaatcagattcttataaagtaagtagtataataatttgtcaacaaaagtattattacaaacatggaaagtttcatttggagcaaaataaacacaactacacatagaaaaacatgtcattcatgacagcttaaattcacttaaacatcctttccctttcccttcttcagatttctgagttaggaagggtgtatttccttcctaacttgattacatagtgaggtgaggaagcggttacctactgttattctggcagaaaagactcagtatgcattttggcaggcttaccacagcagaaagaatacgggactccttcccctttctatgcctctcctatgaacttgtcactcaacctcagttgttcatcttgaacctggcataaccgccttctctgtccacctctgagttactgagacaatccaataaaataatctactgtagggggccttgggatatggcacccaaacccttcaggcctgaaggctaattccccagctgctggaaatgctgctggctgacagtaccatccttgctgttagcccttactgtgaaaatcccagggctgaacaaccacctgctaaagcttgtgttctcctactgatcttcacctaaaaatatcttatttaatccaatttccctctatatctatttggtatagacgcaatgagaaaaccaactatgccttcttcacatgtgtgtatgtctgtgtgatactcgaggctgtgggagtacatattaaaaaatatgcatgtgcaactgcagttctaagaaaggatttattacagaatacaggaaatacgtatgcagggacgctgtgcaagctgcaaggagcggtttccaaaatggagttattaaacacagtaacaaaggttccaaagtgattgttccacatttcaaaagccaaacaagcaactgatggctgtactggtttgctaaagattctttgttactggccagaattacattaatctatcttggtaatactgttttacggtgatcaaaacatgtaaatggtagtttaatatatctttaatcaaaatgagaaaatcaatgatggcttactagtttgatagtcccacaggagagaaaataataaaatgttgagaactatcactttaaaatattgtatgaatataactgagaaatatatcttatttggtacactaaatacctgtcgtcttagtgaagctgcatctacaacagtcaggtcatctgacgttccttcaatggttgtatctatatttgaaatgccatacctgcagataagagatagaaatacaaatgaatagtaaagtagaactcagagtaaatggcacgccacatcatgctttgtgtaatgctcaaagtagtattcagaaaattggtacttaataatatgaattactaaaatattttactacctgaatttgtactaataaaggaaagaaaaaagcttaaaatgacaactgtctacaatattgaaaaagggcactaaaaactggagaatgggaaaaaaatcctgactaaagaaacacatagaaaattctcaagccagaaggattggcgatgctaaaaagggtccctggctgaaaaggtttgagagctgccacttaggatagaacaaaatataattcttacacaaacttatgtccatatgtaagcccataggcacagactcactagcagggaacacaaagtagactaactctaaaaaaagaaagactcatcacctcttctcactgcctcttgtcttgccatttttattctttacttcttgtctttttatttttttgagacagagtttcacttttgttgcccaggctggagtgcaatggcacaatctcggctcattgcaacctccacctctggggttcaagtgattctcctacctcagcctcccaagtagctggaattacaggcacctgccaccatgcccggctaatttttgtacttttagtagagatggggtttcaccattttggccaggctggtctcaaagtcctgacctcaggtgatccacccacctcagcctcctaaattgctgggattacaggcctgagcaaccacgcctggcctattctttacttatttccaattacttatgctctactgtgttctcccgcagaaacaattataaaatctcctgaatacatcttaccactacatttagctccagaattggcccaataatgaataaaatgctgtgtataaaataatactgaaaaaccattaagacaaaatccagagaaagcatattaaaaaagtactttttgttccaatgtagttacttctaaagcggcactaatttctaggtgaatgacactaaacctctgaaaaacaaagacaaacgccattcctcttctttgcctggatttccacattttaaaatttagtttaattaatagcttcattgagatacaacttatataaccacataattcacctcacatgtattttataccctaaatggttattttagtaaaatggcatagtaaattttctaaatgagcagaatataaataaactaaattaaaagttattcctgtgtagtccagagaattggcaaatggatcatctattctaatacctatcccagcaagtccccactacaaaaagtacatacccacaaaaagggatatgaagcagaattatacttttcatccagacatgttaaagacaagtctactcagaaaatccttttgttttaaatattgttaaaagtaataaaaatactttaataaagtatgcaaaaaaccttaaacaatagatggtgtgtactgactctagataatctacaaccatctccaaatattccttctatggctaaattatcctgctttctcattaactgtctccttatttcatgagaacacagtaaacaacctggagcagttagggtaattataccagttagagaagtaaacttctaagttagtagatgctggaactatgggtttacaaatgattagtggaaaaaataaaggtagaagattcccttttccttcacttcatcctcaaaataaaactcttctcttttactgaggccacataacagaggaataattaggaaaaaaatcaaacagaagcaattgttaaannnnnnnnnnnnnnnnnnnnactgaacatacagaatgaagtacaaatgaaagcgattactcacaatttatatcctgaattaactaaggtttagatatctgaaatctcgatttgcaaagaaatataaggatatgacaaaagattttacctatatacttcaatttaaaacaaaaatatgttactttacattgtgttttaaacaaaaaccgtatttattagaactaaaaaactctaatgctaagttagaccactggctgaaaatactctgacagaaagataaaagatcacaaacttagagaaaaatataagggaaaacgacaatgaactgaactaagattgtaaaaagaaacaagtcagcagagtggtaagggattaccacaggcacgcttttcaattcctccaccatgaattcaattttaatgagcagctaatgcttcccttttctcttgcttcaatgaatgcaccaacttctaagcacagaaacgatgctgccagttttaaatctactgctaccgacaatatatttctgcttaaataaaactgactgaaaaaattatacagtaatagcatctgtgaataccaacaagtttttgattttttccagactataggaaaactaaatggggattttggcacttaagaactgcatgtatttgtatgtgccattctgccagcctctgtgcgtgtcaggaagaaaggaacgctcaacctacgcgtgtctgaaagtgtaaaaagggcaaaaataagagagaaggccttaaatcaacagatgataaaaatgcttaaaactaaatttcctttctaaatatgtaccttcccaaactgtggagttgttaatgctgatttctcccaatttaagatgaagccttacaaacaaagacaggtttgttcacacactaaaagtaacattccagataattaacaacttaaaaggaaatgctgggcacaattcaggcaaccattaaaatgatgtacataaaataagatttaagacttttttctgttttagcatgtaaattattataaaccacctataaactattaacactacacttaaataaaatagctgttcacatcataccataattattaaacattttccctcatactaattggccaaatgtcatgactgattattcactgttcttagagagaagcaagatgtactcatcgaggaaagctgtagaaacaagttcagctacaaacacaggcatggctacgacatgcaacatgccctgcaacacacaaattccgccaagcatttaccctggtaattacgaagtctcaaaatttacctgacgttgtcatgatgaggattagaagtggcggcagcagacccaccacgcaacacaggtctaaggcaggtttttgcgggagaaggcacaagacagaatcaggaaacagagaagtaataaaataaaagcaaaaacaagacaaataaatgtcaaataggattatattgtatatttcaatacaatataatatctctcaactactttaaaaaatccttgtctcatgtgtcctccattttatcattttcataaactcaacattactattgatcaaagaaacaaagggaatctatatttacacgacaaaacagcaccaacatataaaataattttcttggtgctttactttatgaaatttaagacagaggacaactctgcttaaaaagtgtaattcctttcttccagttggaaaaaaaaaatcactagcacctttaaaagcatatcaggacctggttagctgcaccg

SEQ ID NO: 35 - DNA, 2294 bp, Homo sapiens
atagccactttgacaacgtttctgagccaggggtgaccatgacctgctgcgaaggatggacatcctgcaatggattcagcctgctggttctactgctgttaggagtagttctcaatgcgatacctctaattgtcagcttagttgaggaagaccaattttctcaaaaccccatctcttgctttgagtggtggttcccaggaattataggagcaggtctgatggccattccagcaacaacaatgtccttgacagcaagaaaaagagcgtgctgcaacaacagaactggaatgtttctttcatcacttttcagtgtgatcacagtcattggtgctctgtattgcatgctgatatccatccaggctctcttaaaaggtcctctcatgtgtaattctccaagcaacagtaatgccaattgtgaattttcattgaaaaacatcagtgacattcatccagaatccttcaacttgcagtggtttttcaatgactcttgtgcacctcctactggtttcaataaacccaccagtaacgacaccatggcgagtggctggagagcatctagtttccacttcgattctgaagaaaacaaacataggcttatccacttctcagtatttttaggtctattgcttgttggaattctggaggtcctgtttgggctcagtcagatagtcatcggtttccttggctgtctgtgtggagtctctaagcgaagaagtcaaattgtgtagtttaatgggaataaaatgtaagtatcagtagtttgaattaatttgagaagtacacttgttttcaaagtcatctttgagatgatttaaaaaatcaacccttcacgtagaaagcacgttgtaaatgcataacactctcatatcagtggttgatttgggaaaggtggagagaattttcaattagttttgtgttgtactattcaaattttttacctcttcactgtgtgtagagaaaggagaagggaaggaggatgagaaggaacggaagtcatcctgaaaataaaagtacaggactttttttttttttttttgagacagggtctcaaaaaaggctggagtacagtagtacagtggtgctatctcagcttactgcagcctcaacctcctgggctcaggtgattctcccatctcagcctccctagtagctgggactacaggtgcgtgccactatgccaagctaatttttgtatttttagtagagatgggggttttccatattgcccaggctggtcccgaactcacggactcaagtgatctgcctgcctcagcctcctaaagtgctgcaattacaggcatgagccatcgcgcctaaaggacaggacctttttattgtatttctttaaagaataaatacataacctgaatgcaatcaagtctttagatctaattctcagcttgcagggaacactaggacaaatccaaaaagtgggtcagcgggcacagaatggcccaattttcaacaggaaaatgttataaaagaaaaatatttttgagggaactgttatagattaagagaatagaggcatgtttcagctaaacacatgtaaactttgtcagagataattgggaggagtatgtagaagaatcggattattgttaattttggtaggtctgataatggttttatagtataaaggctgagtaccccttatccaaaatgattaagatcagaagtgttttggctttcacatttttttggattttggaattttgcctataataatgagacatcttggggatgggatgcaagtctaaccacaaaattcatttatgtctcatacacactttgaacacctggcctgaaggtaatttcacacaatattttaaataactttgtgcatgaaacacaattttgactgcattttgactgcaactcatcacatgaggtcaggtatggaattttccacttgtggtgttacgttactggctcaaaaagttttggatctcggagcattctggattttgaatttttggattagtgatgctcaacctgtatacagaaatgtcctcatttttaaaaaaagaaatgcatatttatatgttttaaaattacttcaaccaaaagcaacggggagatgtttactgttatatttaggtgacaggtacatggcaattcattataccctcctattttcctatgtttacattattcattaattaaaaaacaatacctagaaaaacccaagactttcaaaagctattttctatatgtgccaatctttaaaaaacaggataacaagggtatttatcacattaaaatgttgtaaaacagcaaagctaaaaatctaa

SEQ ID NO: 36 - protein, 227 aa, Homo sapiens
MTCCEGWTSCNGFSLLVLLLLGVVLNAIPLIVSLVEEDQFSQNPISCFEWWFPGIIGAGLMAIPATTMSLTARKRACCNNRTGMFLSSLFSVITVIGALYCMLISIQALLKGPLMCNSPSNSNANCEFSLKNISDIHPESFNLQWFFNDSCAPPTGFNKPTSNDTMASGWRASSFHFDSEENKHRLIHFSVFLGLLLVGIVLFGLSQIVIGFLGCLCGVSKRRSQIV

SEQ ID NO: 37 - DNA, 34151 bp, Mus musculus
  misc_feature (1)...(34151): n = A,T,C or G
taaaggtggagatgagctgggcagaggacagcaagcatggagacagagggagacacagaggggtcctggcaatgacatctgctctgctctctcctccaccgcagtagaagaggctgtgatgggttccacacactgtgtgtgtgtgtgtgtgtgtgcgcgcgcgcgcggcgtgcgtgcgtgcgtgcgtgcgtgagtgcactgtgtgtgcactttgtgtgtgtgtgtactgtgtgtgcactgtgtgtgcgctttgtgtgtgtgtgtactgtgtgtgcactttgtgtgtgtgcactttgtgtgtgtgtgtgtgtgtgtgtgtgtgtgtgtgtgtgtgtggtgcattcattccttcatttgttttacatggcaccctttaaactctaccacaaatcttacaaagcaaaccggcagatccgtgatggcccagaccctgaggccacgatgtactgctgtacaggctgtgcactgaaccgctccatctgcttcaggagtaacagcctgtagccctgctccacgctgccatttattactagtaattacctattctctttctctctgtttatataacatgaagagagtaagagctaaggatatggagtatgagacagagaaatgcatgtgataaggactggataggataaagcagttgagggggcacggtctaatgtgatctgccaagagggaggaaaggaaccaagagcaggcgcaggaagagcacttggcactgaggaaagggtctatgcaaagggcctggggtggaaacacatttgctgaatcagcaggcaggaaggtgagtttcctgttgtaatccaggaggggctgtgtgcagggaacagagaccacagggccacagtgcccacggtgacaggtgagaagggaggctgtatctcccagtctcggatctgctttgcaagggctctgttgggcaggtgtggggtggtgcttagagctgggcataaattagcactggacataaattagcctgggtaagaggagacaggagtggtcacttagagagggagagaaaatctccaagggttactcccagtgggaatgggggtaagatgacatcttaccgtcagaagggggaagcatatttcaatctgccttaccgtctaggaaatgaacaagatactgactgtgctcccatgagaagctgagctaacagactcagatatgggggaatgccactttgcttctcatggctctggagagacttggaaaaaccgtctccctgccttagcatccccattctctcttccatctctgtgaacattaggtgccctacccaccaccgaacctgaggttcaggcatcaccaggctctgtgcgcaggctggggctaaaagcacatgttagccattaatgaccccagggatggtgcagtttacatgcctgctgggctggttggcacacgctgtgcccttcacataaagctataaagccgtaacttatttatacccagaaaccagatcgttgccttctgccagctctccttcatcccttctcaagccaggcagagagactcccacaatgccctggtgctggagcatagtggagcagaagaaagggccaaacaatgttgtcaaggcaactgatgacctactatgtgcccttcatgatctttcactgaattatctaaatagttctgtgaagggagggagagagagaacagggtcctgtttctattagcagttccctccacccggaagtcatgtgcagatttccaagtcacccactacagtgaagtttggcacagtagtaggatctcagggaatcccataatcatgacactgttgtgccagaaggccccagaaggccacagtcagccaaggctacacagctaagagtcagcagtcagagggcctgagactctcggcaaacatgaagcctctttgatggttggatctcaaagttacccagtgctgctgtgtcctgggggcctgtgctggggccaaaagagccaccgtctcagtgactgtggacctatgaagacagacaggtgacagaggagtctgtgattcgctgtcgcagccgctatggccaggtgtgctcagacctgtaagaggcccttccagttcttggcaggaaggacctctctggaaaggatgctgctggaaacccaggctgagcaaaggtcagaaggggcggattaaagctctcctctcaacaagtaggggcagtaaaatctgtagtggttggagatctgtggggtggggagaatagcagctttgccacccacagatttaaggattcagcctttttgtgtataaagacaacctggaccccaattttccatctaagtgatgggccacctcccagaggttgctgagtttgagatgtactcgttaagatctgtaccccgaagcctcatttaatactgggctttttttttctctctctctcttgctgtgatggagggaagtgggcggctggtgagctgaacgctgagagaagggagtgtttaggggtcccttgggactagagattatccacgaggcccctcctgaggctgtgcttagccctacagagggaggaacgcggcctgagcagcctcccaggtgctcgggtagatggcccagccaggggtgaggcaggccgctcagggctgcgcagctcccagcagttacataaggacgctgggcgccggagagacgcctttgttgctgcgatccgcctcggcagcgccgagtattaataaaccgatcgcccggaacgcaggcgggcgggcgggcgagctgcgggacgattggggctgcagcgccgggagggagcgacacccacagcgtcctccccgcaggaggagactgattctccctccaagcttctcgccagcgcccttcccttcctcgcccacctgccttcgcaggtgggtgctaagaacgcaaacagtgatccagaacccaccactgtggactccagccgctttgctaccgtttccatgatgcatgatatctggccttggccttacctgtaagacagcagaaaagcaccgaagtgttaattaaagtacccctgcctcctcctgccttctccccactcctttcttccttccctccccctctttctggtcgtcacagcccctatctagtcctctgcctctccctggctttcttccctccccctcctcccactctttctctgcctcctcctgatcttcttccccttccccatttcttcctccctatcctcctctctctcctcttctcctctgtggtgctgcaaattgaaactaagatcccacactacagcaagggctggaccactgagctacatcccctcccctcccctcccctcnnnnnnnnnnnnnnnnnnnnnnnnnnnnnnnnnnnnnnnnnnnnnnnnnnnnnnnnnnnttttctcctttcctctctgctggagaacaaacttactggtttgtgcatgctaggcaaatactgtaccaccgagttaccaccccccacacccccactctggggccttcagttgttaagagtgtttttgtttatttgttttgtttgagacaggctcttgcccaggctagcctcaaactcagcaccttactagctcagcctcctgagctgggattactagcttgcatcttgcctagaaaagagtcagttttcatgagctaatgtaggagcctgatgcctccccccaagtctgttcagtgcagcccctggaatccttaggagtcttgtggcaaggttactgccctgggaacccctgcccaccccagctgtctactcctttgcttggggtagggtatacacatttttaagacttcctcccaatatgttctgagaaccacagcttggtaaatccatttgcactcagtcatgaattcagggcctgggaaagatagtcctgagtttaagccctagaacccatgtaaaagctttcctatggtgacttgtacgtgtaatctcaggctagagaggcagagacactgagtatctggggctcacggtcagctatagagacccagtcacaaaggtgtgtagcattcctgaggatgacacttgaacttgtgcacatgttttacatgcatgcacatacatgtatacatatgtacacaggcacacatgtgtgcatacgcatacaggcatattttgaaaattctgtttgacagatattttcctgggacaacatgtgagttcacttggtaaataaacatgggtgacagtttggaggagaggttaggaccctaagggacactgtctatgggaggcatgacaatctctgttgtagtcatcagcagaactggagccattttgggctagactgccagagttgcatcctgatctgtctaatgtatgactcactgagccttagtttccttatctataaaatgggtgaataatgaggccaacctcataagactgattaagaccccactcagaccaggaaagctcctagagtggggtcagaatgtccttctttgagagaatatgaagtctgctggatgtggtacccaaggggcccagcatcgttttgagtaggaggcagttaaaagactagttatagtctaagatggaggcccacaagccaggacatggccctcagcacagggctactgctgtgagggcatctggggagtcaccaagaatcagctgagaatctagaatctgctaccctctgccttcattcccacagagactcttttcatacataccagggtcagcactcagagagcctctagccagcctgaggccctctcctatctgatttgtgggagtgtcatctgcccctccaggtgaaccctacacccttgagcttagaacaccaggcccctcccctatccctgacctgctagagaatgtctttctttctggtagcagcatgcacccctggctcctacccctgccttctgtagctcattcatcttgagaacaatgagtgttttagggagaacttgctgggagtcaggccccgagttaaggactcacccaagcagtttcctcagtccctcaggaccctggacatcaccacggtcactctttctgtttgacagaaagactccaagaggctaagggacttgtcaaaggccactaagataaagaggaccagggccttgtacctcacttggtccaggaaggatatgctgggctggtcctgtcagctcctcagccttcctgtcactgctatcatgggttggtttcccaagctgcccaccattctttctctgagaggcctgagttccactgtcatcgtgtgtgtgtgnnnnnnnnnnnnnnnnnnnnnnnnnnnnnnnnnnnnnnnnnnnnnnnnnnnnnnnnnnnnnnnnnnnnnnnnnnnnnnnnnnnnnnnnnnnnnnnnnnnnnnnnnnnnnnnnnnnnnnnnnnnnnnnnnnnnnnnnnnnnnnnnnnnnnnnnnnnnnnnnnnncaccgcccccaaggcttctttctccaggtaaggagctgtgtgacatttcttgttcccccagcatccatggccaagtgttgcagtggagatgagtcagctggggagggcagccatgggggcgtgtgttagggacggctagtttacagactggaggagaaggagggggaacaggcagcacagggaggtggggagggagggacagccagggaattcctgatcttcctctcctccttcagacccccaaagctgagttcagcctacggcttcctcaaaggtcttggctaggcagactcagaaagaagaggctgtggaaatcagaggagccaggaaaggaaccagctcaactttctcttctgcttgggcttcagaggtacccatgtggtaggcagccgtaactcaccctggcttgtcagttgtcacctcagaaccaccctctacagtctcagaagcacctttaccctgctcccagcagccggcagccatagctgcaggaactttctctgtgtagctccaagctaacggcttatgacacactgcactgtcacagctaaagttcttgagactccgaagaggtccacccagtcgatcactctatgataacatagaaggaatcagaggctcagagaagttgcactgctggcccatggtcccacagccaggatttaaacccatgcctgtccaatattcccaagctgaactacgactgaactcaagacagtcctgccctcctctaacatgtccagagaggtgccatcgctgagacctctctacatgggccctgctccaaagatcatgcccagtgctagttgctcctgtgagccctctaccctcgcccccccccgaccccgccaactctgctctaactgcacacgccttcttttgaattatcatcactgctattattatactgatgtgtgtatgatgaggatacccaagccatggtacccatgctggcatcagagaataacgttgtaaagtcagttctttcctcccaccttacataggattcagggattgaattcattagggctgtacagcaagctcttgacccactaagccacctctcctgcctgcatctgccttttttttgtttcgttttgagatggtgtctcatatcatgcatatagcccaggttggtcttgaactccttttgtagctgaggatgtccttgaactgttgatcctcctgcctctgtttctggagtgctgggatcacaggcatgcatgtgtcaccacgccctgctcatgaaatcgtattctctccctcagggaccatagtcctgaagtgagtcgcgagcccctcccccatcgttcacacccacttgcacacagcgctggcacagttagcacacatacttgcacatactccctacctctagggcacagaggtgttgcctttcctgcggagggagcccaggacaggacagatggattagcagctgcagggtcttcgtaggagtaaccctcaccggttggctgctccctacttctaaggctttcggtagaacattttagcacattcggaatcgagcttctacaggaacaataggaatctgagtttccacttggcaaacctttttaagcagtcgcctcactggcttctcgaaagctccaaggagcagtgataactgcatgtccatttccttcccagatgcaacagagggtcactaggacagggggtttggagaggcctttaccatcacagttcacgtcggctaactatgcgtgttgcttcatgttactatgtgcctgaccaggtaagctcgcctgcagccgatgaaaggatgaggtaacttagaaacatgtttgaacaaaggactcagcacatattttctcttactctgccaggcacctctgggaaggatgcatgcccccatgctgtctccatttattggttgaagaaatacaaggactaaatggtggccttaagaatgatcttaaacaaatgcagagttttggagaatgtatgcacagaggtgggcacactaggggagtggatggggagatggttggatagtctcttgtccctcagtactgttttttccaattagctgtagtgagcgctctgtgtctatcagcatgcaagcagaagccagagagaggggtgaggtttaccagagggctctgtacttggcattgccgtcgtggatatcctctgagctctgtgttctttcagtctcccagcctgtcagccttgattgtgagcagtttcccttctgttagagatcatgggtacatatctgtcctcccaacagggtgggagtcagggatgcctttctgtcaactccaaggccccaggactcagcactttacctagcacacatctggatagctataccttctgtgatggtttgtatatgcttggcctagggagtggcactattaggaggtgtgaccttgttggaataggtgtgttcctgttgatgtggcttaaggccctcaccctagctgcctggaagccagtattctgctagcagccttcagatgaagatgtagaactctcagctcctcctgcatcatgcctgcctggatgctgccattttcccaccttgatgatactgaacctgtaagccagtcccagttaaatgttgtccttataagagttgccttgatcatagtgtctgttcacagcagttaaaccctaactaagacactttctttgcaaagcatatggggctctcacttcctgataagacaggcatggaatctccagaacacagatgcccagagcttatagctctgtctacaccgagcatcactgaaagtgtaagtcctaacactggtgaccctgtttggttccacttgcttgctgctaatgaaagtgagatcattacttctaacatagcctcttctttgagaaaccttgggccattgccattaggcactgcttctggaattctgccttcaggtcctgcttctggtagaacactgggaggtgtttctaagctgggaggtgctcagggatgacactgttccagtgacacagcccagagccctgcatgccaatagtgcaacaaagaatccattatcccatcactgtcctgaggtgagactctgaagcaagccacaatgaagctcctggtcagggacaggtggcttggatgtgcacttcactccacacacctccaggcaggcctgatccagagctacagacatgacggctgagtgattcattcattactggtcatcactagccaggtgttcagcaaaagcgggtggcactgtgggaagggagtttagttgccttggtaatcaggaggctaacagccactgagagctgacttgctatgcaccagacactcttctgtttacttccttgcaaagggcacagcccctcctgtccagccccagccactgggagggccatggagcctacctggtatgttagcacctcacacatgatcaggtttggttaacatggcctgcagctgtaactggaatctcagcaacagccacaaggtacttcctgctataaggtcacacccctttgtaggtaaggaggcaagacttggagaggttaggaaacttgcttgcctagggctaagctaaacaacagagccaggatttgaacccaggtattctagttctgtagcctggagcagaaaagcaaaacttaactctggagccagaggcacacctagttgagttatagtgaggggcagctactctccatctctgccccagttctttaccttcaaccttgcttctctcagtccccaccctccctcaagcctttactatatcagtccagaagacaagatccagaggtttctttcagcaggaagcagggccctgggcaaaaatcaactgctataaagggtttctcagggagtccagagccaggcatgggacaggttgtaggtgctggtctttttagtttgagagacttctcaagactcacctgggactctctcttggcatgagctgtttgcttccaccaacaaatactctgaagccacagataagatccaaccttgccacacgcagcacatagcacagcaactgcagtagaagtctcagcgggtaagagttcttgtcatttgggattcacaccaaactggggagatgggtgacctgggtgacagaacactcattcaccaattatcttaaggccttggctatgtattaatgactcgaagttttgtgaactgggactagtcctattggactgctgggaacgctaaggttttatttttgaaagtggtttagcaaacgatgaattgtaaattgcttttaaccgtgttgtttcacccgtgggggaccctaacagtcatagcaggtgccttccttccaccctagacaccggcctaggcctgagaatggatgtttcataaacccgtaggggtatgtttgcagtccgggagaaaggggcgctgtcttcagaacttccgagaaagtcctgggtggcacagcggcaggttgtccccgtccggggatccccctagccaagcgagggtgcgccctccgcaggcggctcccggtaggccctccgtttcagctctgggtctcccccccaacccctctgtgcccgccccggccacctcgggggcgaggcagcccagcgcgtgggaggggacggcgcgccattggcttgtgcgcggcactagaggagggaccagtgcgggccgccagactcgggcgagcccagcagcgccaggagtccagcttgccctgccctgccctgccctgcctgcctagcgcggcgccgcgatgtgagactccccgggccggagcgtccgcagggcacgccagctccgcgagcgcagcaccccgcgcgccaggaacgtaagtctgctgccggcagccgctagcctcacacttcaccgccgttgccaccgcgctggccgctgcctgcgcagcgcagcccggggacgccggggggccttagggaccgctgggggcatcgagcaccctgcgaacgacagccgggcgccaggacagcttggcacttgcggggcggcgggcgcccgagacccccgctgagctcctactggcactgtcctctgtccttttcgtttgtccccttgcactgactcggtttccctttctcccccagctctcttctccgccacctccttccccaggggctgtttatttcgctctcggcctcctccagggctttatctctttgattcggagctagtgagagcggagagtaaagcagtttcttttatcccggggtctctgtcttcagcgcttggttctcggtcccctccccctttctcgccaccgccccccctcctcccgcctttgtttcccggcgggaggattgcgcggtgtaaacttgcgagtttccgggtcctcgcccccacgggtacgcgggcggagaaggtggaggggttcccgctgtccagtggtctggccggaccttttgtgtgggtgccggggactggaggagtcgcggactctcgcttcacaaagtgggggagtgtcctcggcgcggagatgaagatagatcagagggggaaggggcaaagccggcgacactcctgagtccctgctggagaggagcgggcagaaaagtgtttgggcctgaccccagtcgggggtggtggtgtcaggagggtattgcaggtggacccgggcgactctctctcccaaaccgcgcagacagctgtaaagtgtagcgccattgcctggcgcaggatggattggggtcccgtgtagtgcgcagaaaatattacgcgcaccatcctcggggcacagcgaggccagccgctcgcttcggctcccctttcgtcgccttcttgcatcctggatggagcgggcttctcctcctgcctgtgaggtggaggagcagggataggcccaggacccactcccactttgacccaaagctttacaagcacacggccaaggcctcctcaaagtcccccagcacggacttcctgtttcgtttcttttagaaaaactttctggatggggcctggagagagtgtagaagtccctgggttgcagggacacccacccagctgtgtctcccgtctggaggctcctggagaaaggccgccacctgccgccggcgggattggtgggctcctggaagaatccggaagaacaccacccgccccttagtggcagcctctggctcagtccgaggctaaaaaaaatactattttcctgtaggatctttggaaagtcagaatatacttcgggtttctgttgtcaccttcgtacagacagagcgctctcctagagtcccctctggccttcgtgtcttaggtgccctctgccttagcttctcttcttctggactctcaggtatgtctgccttcacttgctgttcctggctttgatttttctgggtccaggacctctgccgctcctatcacctcaactcacagcctggacttgtgacagccccctctgctggagacagaggctgccggctaggggcagggtcttcacgaattattcttggcttttctgtgtgttcacttactgctccaagtatcagtgagtgagccacagaagagtgatgtcgcagtggccagcacgggtcccacaggtccctgcacacctgtggaagctgtcaagactctagatagtgctgtgtcttaagcaagatcagataaataaataatacataagtcgattgggccacatgccgtgccttggcgttttttctcaatacccagaaggctgaggcaggaagagtctgaattacagaccagtttggactatttaggaagaccccgtctcagaaagaaagccagagtcaggggaacatggagagtgttggggtgttgaggccatttttaaggagtggtcagtgctgctttctgggtcctgcagaatagcctgtgcaaagagccagaggcgcagcactgcgctgatcctgtggagtggggtgaggaagagacaggaggcactggtgagacaggatggggacccccacatctcacaggtgatattaagagaggatctgtaaaccagcatcttacagccccccccccccagttaggaggggcagccacggggtgccattttgttctgaatccaggtgggaaggcctcatccccagtagcattctctgtgtccctatcacagccacagtagacagggacaggaggacagccgctcaggccaagtgctctggaaatcccctgtctcccaagaccctcatgcttcttcatgcctgcctgggtcagtgtgctggtcatgacccagagtcaccttgattctgcctcaccccacttcctcctgatactaccctctttggaacactctatttgcgtgggcatgaattcctggaaggggttctgctccgaaactgctttagtaaagggggtggggggactggggcccaggtgtttgagtctgtcggtctaaacagcagccttgttgatcactggctacaaaaacacaaactattctggatgtttgtagacgacttctcttcagggggaagtgtcattatgcccatttaacagatggggaactttgaggcccagagaggcaggcctgtcttccgacaccatgcataggatataggggtagaggatgtgagtgagcttggagttttgagtgacttgccttgttaatcacttagccagagactaagtatgaagagggagatctcagccttggactctgatccctgcccaggggaaagcatggcttcagatcatctagtctgaagacattgtgttaagcttgtcttcaggggaagacacccccccaccacccccgcctccacccccaacccccattgccccttctgttttgttgagtagcaagggagaggtctggggaggaatgacaatagttgaggggaactgctgcctattcacaggagagccctggccctgtgggaaccagaagctaatggatgacagggccagctgcccttgagggcactgactctcggtcaccaggccccagggaggctggcccactcagggttgaaaaggacaggaattctccatgctgtgccttgccttttgcaagcgacagaaggacaggaaaggccttgtcggtgacttctgagaggctgcctgagaagctggccttggcttacacggggcagcagcctcagccctctgggtgaagccaagccctgctccccgaaggcaggggtgtggctcccaccctctctcacacagctaccattggggttttttttttttgtttttttgttttttttttttttgtcccctaagctctgaagatatatgtgatgagagtcagggctttcccccatccctctggaagtcagccaccttccaaagacagagaaaggaaagaagatagaaagaagaggaaaggaaagaagagaaaatctctacaggaaagcgggaagaggctgggaggggctgctgaggctgggcagggcctcgttgaaatgcaaataaatgtgtttatatagctggggtcagggttgcctagtcaaacctgtggagggccctcgagaccacactctccacccacacagaacactgtcctgacagcaagcccgggctcatcatgcctgtgacctcagctgtcctccttgaagcacagtgattcagggcaccctgacctccaagtgccagggcaaaccccgtgaccccagatcccagactcagggtcttgagggttcgaggaacctggtatggactctgtagctttgtccctgggatgggtctgttaccacgtccgccacactaaggacttgaaagcatggtctttgtcacctgctccgttcacagccagcatcttagtgacaatggagcccaccggcacttctctgtccacccaggcagtgtgctatagaataatttcattccctggggactaaggctctgcttgtctgccagcaggccctgggcacagtagcttccttttcatttccctcttgtttgggcttggaagatctccgaagaggcccatccagtcctacaggctgtgccctataacccttggctttgtgggtggggcgtggcccccgtttgcagggaatgttgctcttcacaagacagcaagtctgtctgagtccaggtctgggaatgcaagcctagggtgggaacgtggtaccttcaccctctgttctccatgacaacctgaagatgtgggccactctgccacagggccctagcggttggttcctagcgtttggctcctccatcttgtcccaaactagtggggttccctagaagaggcctcaggtggttctgtaacccagaaaccccaaagtccgactctgactgtcgctgtcctcacttgaatgcagccctgctcagacctatttccagctagtctacacagagagatagcagaacaacgggctcccactgttggcactggttcccagaaccctgcccacagcacaggccctgaacccaagagaggcccgacagggtatggaggtgtggcttcagacactggggacacaccaaggctttcgaggggacggtgctccggaagacagtttgaagctcagttatgcttggggggaggggcattccatgttcctaaccaggtacttatgcacagacatgcacacacgttcatccccccagcctcccatccccggatcctctccggaggtcctgtgcaagctcagctcgcagtcaacttgaattccatcaccaccacaccctccaagccagggactcctgagtaagtcgtgtgggccttagtgctctcgtctgaaaaatggaatggaaatatggctactgtcacaggcaatcatgtggacttcaggggttcccagcctggatgtgcttgctggcagctggctgctgtccccagctcaggcaggacgtgtgggcagctagctccctcctcgccggtaggagggcatttgcagcgctgcacctgtgcccacactggggaggaagtggctccctggttgaagggttgtggctgttactcaggggaagtcactggagcagctgtgggtgttctgggttccttcttcccctccccctcccaggccagcaggtttcctaagccatcccccttgggcacagcctccctgtcgggacagctctgcagtccattggtttctatggcaaccaggcttcctgggaaggatggggaagtcctggaggatcagcgtgggaggggtggacccctgcctcatcaggtctgctggccagggctgagtctggctaggagttcattaataacacaagacattttgctgtcctttgtggagcacagaccaagagcccgattctttcggctgcactctatggtgtattgcaaactacctgggtaggctcagtctagttttttagatgaggacttggaagtaattttctcgaagtcacagagaagcggagagaaagagctgagctttgccgccaagttttcctagttattaagagtgtgtccctctgctgggtgtagtgacacgtgcctttgatcccagcactggggaggcagaggcaggcagatctctgagttaaaggccagcttggtctacacgaccgccagggctactcagagaaactctatctccaaaaaaaaaaaaaaaaagggcgtgtggggggcgggggcgggggtggaagagtgtcatttctcattctttggtcttgtacacccagggaccctccttttcctgtgtttagacacccactttccttgagcctgcagcaccccaggaaggtactatcatcaaagccatttattatactggagcttcagatgatactactagatttaaggcctcaccccttagagagtgaccaggttggaagtcagccctttgtacaaccgtctctgccctaggccaatagcttcaatgtagttgaaggcagatcctgacccatgggcattaagttcctgcctattcagtgtgtggtaggagcaacagcctgcctgcctcttctctctccttggctacccctgtagactgcagttagggaggcctgggttgtgaggacagatgctctgaggagcacagaccctctgttcttcttctgttgggtcagcctttggaactagggagtgggaagtgaggagacataggttgtagatgtctagggatgaacacaggagaacagctgagccccgaggaggagagcaggggtagagctggcctgctgagagcggggtgggggtgtgtgtgggggagtaggaggggtaggagaaggaccttcccactaggacgagtgctcagagtgactgtcactcttagaaggatggaggttgctggggatgttctcgaggactctgacaggaaagggaggcaggacatggtcttgcaggcacctgtttcatctctacagttgggagcatgagggtggatggttagccactcctcccacttccacagtcaccgtggagatgtggaggcccttagcgcacagcgtgcaggaaaccaagcaggcctgagtggaaggggccttttccactctcctcatctgagtgaggaaaagaaaggtcgctgggagggagaacagaccctgcccagggcaaggctcatggctggagggtgctcgcctacattcactggcacttctgcatccctgccccccaccccctcgtgctcctgttcacagagggaaactgaggctgggtgtgccctagtggctcacataaagcctgcagcccctaagagttaagtgggtagagccaagattcaaagccagcatgttgccagccttcccaggaatggaatgggggaagtgcctaaaacccttggcaaatagctttggcagggaagagtcggggtggagaggccgaaaggccgtgtttctctctctgagtgtgtgttagtgttagtgggtgagtcacggagcagaggaaaactgtccctagctgagatgcttccagctcaacacagagggccatgcatgatttagctagccttgcacctggtactgaggtctggggcttgatcccatgtggtgggtaaagggctaatgagatcattctcttggtcctctctgtcaaagccaccgtggtccagtgtaggggaagtgctggggaggtggcggcatcctgtctaataactgctgtcttcactggacactgtccaagacgggatgctgaccactgagttgagggagatgacatgctttgtggcgttctgggagttagtccctcctttccccgtatgagagaggaaactgaggcacagaggtaagcagatggcatacaggcccacttaaaccactggaggtcccagatgtgagtccaggcagcggagtgtgcagccctccagctgtggcacagcagttgttttctgaattcatctctgttcagggtcctgattcttcttagaccagctcggggcgggtgtgtggtgtgtgtgtgtgtgtgtgtgtgtgtgtgtgtgtgtgtgtgtgtgtgttccgactcctggtgataccagcagagctctggtgtctcgctgtccatgcctgacacacagaggaactcagtggatgggctgtgttctgtgcagtggcctctcttcatactctgagccatatttacctcaaggttggagctaaagtcctatttcacagacaaggagactgaggctcggattagtgaggtgacttacccaagtggcacagcaggattgaatccagtgacttgtcacatctggcttcatgagaaagtttaagaatctagggtccccaaagagtagggctaaaatagaaacagcccacagctagcgttgtcatgcgtatcatggatggcgtgtgtggtgccctggctgtttgctttgtccacaccccatttacctcagaggcctgcaaatgtgcggtccccaccaaaagcacacaaagcacaggcagaaacaactgaatgtccctgttcgctatgagtgtcccacagaacaatgatgcacagtagaaaggaatggacgcctggggcaccgggcgagctgggaaaggcatcccgttgagtgggagacgctgcgcgggcaaacgttcatatgctttatgattctgtttatgctacacgtgagaacaatccagacggacctggagtgacagagctcagacccgtaactgctcgaagtgggagaactgggtacacccggggctagcacacggcagtcttgacaggtgaactcactgtgtcctcacctggaagtggacatgtcatgaatgatctccacagtcatttcagtgtggattaagatgggggaggtgtgtcagaggggacatgcgaagtatgtgctgatgtctctgtccttcaaggagggttggctgggccgggctctgcacccttgtgtggtgtccagtctgtctggagtcaggagaaagtggtggcctgggttggggatttgggccccacttgaaatggtgtgactgaaaggacatccctgcgtccccttagaggtgctgagtgcctctttatggggcttaggcagttgtcgcatcctgtctcccgccatcaggtacaggaaggaaaacagccactcatttcacacatgaagagtaagactgtgtgtcagaacctggggcccaggtctcactcgcccttcagccccagtggtgactgggtttgtggtgttgtcatttggaacaaaacctcaggacctcttctatgtacctcccctccccctggcatccacaccggctgtgcccctctgctggtgtgtttgttgggatgctctatttcattctaagactctgggcgtttgagaaggaacctgggctatctggggacatttcctggggctgcaagacatcagggacatggcgctgggcagcaggtggaaggaggaacttctaagctgtgccttggaatgagtttgctggagtgaacgcgagatgctggggtaccaggaccctgggcactggccgggtgagcaggttggtggggatgcagggctgggatgctgttcttgtgttcagtgggactatgtacatcctggtggagctctgtggaatggtctacatttgctcccatccttcagggcatccttgagatgcagagactggagctgcctggggtcagccagagcctcacttggttcccctccgcgccctgtgttctttcctaggttgtgaggactgagcacaagagagggcccctcatctcagactccagtgtgcatctcagcatctagctcattgcccatctcagtacgtgccctgtggtatggggtggcatgactcggggctgtggaagatggtgggcagatggaggctggggtagaggctgtggatgctaatggccaggagtggttcacgtccaggcagtgtggccactactatggaaagcctcattttctgggcttaatgtcaccttccctcatgactaacactctcctcctctaggttctgggcagtgatggctgtttaggaggtagaaggaccagcaggcagtgggaattgtctgggcaggtggcttaggacttaggaggctcactctgagtctctgaagtctcctttgtctcgataacccagaaatcttgtcaatgagatccatcctggtccaaatgccttttctaaaacccatattgccactccagggctgactgtaaggccttgtctgacccagtcacctgggctgtgtcatgtccatgggggccagcctggaagcatcctcctcaacccattttacaggagaggaaactgaggcagccgcagcaccatcttctcttaggccccgggtggggcctggccacattcttctcaccctacactgggacctggggtctggaagtccagcaggaacgatggctgaggccagtgtctccccatgtccctcagcagaagaaaaaatggcaggcaaacagccccctccgctcatgaagaagcacagccagacggatcttgtgagccgcttgaagaccagaaagatcctgggtgtgggcggggaggatgatgacggcgaagtgcaccggtccaaggtgagccatgctaggaagaggagtcatgagcctgcaacttccagggccctctgctcgtgtcaggggaatgctatgcccagtggcagaagtttggggacaagaacccagtgcttcttagggtactggcatagactgtcctatagacatgagtgcatcctgctagctctgctggttatccatgtggttattgacccattgtacaggtgaggaagctaagactcacatagaggggctaagtaacttccttaaggttatatcagtgacccacagaaccaggcttccagcccctgctgggcagaccctgagtttctttccttaccacctcttttcagttctcttgtctgggtaccaagggaggcaggagaggttgagcttgcattggggaaaacatttatgttaatcagggatgttctgatggcccccaggtgtccacaggagctgggaggaaggtgggtgggtgagatgctgaaactgaagacttcttccctgatgcctctgacttgtgtgtccacagatcagccaggttttgggcaacgagataaagtttgctgtgcgggagcctctggggctcaggtgagcagtaggtctcgtttggatggttttgtgtcccgggtatgtgtaaggtcctacgtgactgggccttgctctgaattacatccacactgttcattgcctcctcaaatagccctggctgtttgggttgcacagggttcccccccaccccccgtttgggttggcagtgggggtcagggtgagtgtggctgtaactgtcttctcggaacctccccagggtctggcagtttctttctgctatgctgttctccagtgtggccatcatggtgagtactgtgtgtccccgcccaggctgcaagtaggtcctgagacttagatgggggtgggtgtgtgtgtgtggctctttcccttaccccagctgctgctgtcttcactctgaggcccatacttcagggtctaggccaactcccgggacatcctgtccattactggtgtgccgtgcccccaaagtaaccagcacacatgctctgggctctgggctctgggcatcccagcattggatgctgccccaaggaggtccctagcatttgtctcacctcatagctgaccctgtgctcctcctgctgcccacaggcccttgccctccctgatcagctctacgatgcagtttttgatggggctgaagtcacaagcaagacccccatccgcctctacggtggtgccctccttagtgagtattgctgggtctccagcagcctggtagccctcttcatctgtgtctgtgctgccaccttgtggccattgctagaatgcatgtagttggttcactgccctggcaatggcagaggtagcttgggcctggaggcccttgccccattgtgtagataaagataccaagtcctggggagatgagcacctggcttgggttggatagggctttagaagcaatgtgagctgtctctggggggaaagctatagctgaagagctgaggaccggaagaggggccgtctggtctgagaagtgggtgttgtggaataagtgggttcggactcctgggctagggatcaggctgccccggtgcttgattccaacaggcatctccttgatcatgtggaacgcactctacacagccgagaaggtcatcatccgctggactctgctcactgaggcctgctacttcggggtgcagtccctgggtgagtggtgtagggtggtgggaaggctatcagggtgcaggaagagaagggcagagcactgggtgctcctacaacatagaccagtgtcctgaatccacagcccagccgttccctccaagcctgacactcaggatgcacttctaggcacctgccacttgggggcagcagactggcctaggctggtgttaggcttctggaggtcgtcagcctgcagtcccactcaccacagggatggtcgagggtattcagcctagcctagcgtcatgatgggagaggctcaagcacgtgtctgctcctgacctttgcctcccccgacttccttcacagtggtcactgccacgcttgctgagacgggcctcatgtccctggggaccgtgctgctcctggccagccgcctcctctttgttattgtcagcatctactactattaccaagtcggccggaaacccaaaaaagtgtagcaggctgggacctgcctgggcctggacctgggcccgagcagctggggacttcactgtccatgggtcctagacaggcctgcaggcaggcagggtgcacacgccttccttccctcccaggcactccacggagtcatcttgggtctcctgggattctaggagtgacagaccaggctgtggcctctgcaccccacccctcacccttgtgcagggacaactccttgccctgtgtttcttggcctctagactctaacaggcagagtctagagtaagttttagggtctgggctgagtcaaggtgagttcctctgccaggaagccctttctaggaggttgtgtcggccccagcaggggctctcagcttctccccatccagaaacccgatgtgtgagtccctcatcacacacgcacacacacacacacacacacacacacacacacacacacacacacacacacggtgtttctagagatccagttgaggacatctagcaaggggagtgactgcctcccttgggccaagttccccagcctcagcctgcacatctctctctttggcctgctggagggtactctgattctctggctggccgcctgcgtcccagagcaccagagtcccttcccgacaggctagggttaggcaatgtaccacaggcctgatagtccctggctcctagctgcccataggctcctagtgcatgaggaattctgaggagaggacaagtggggacatttcctcggcatggcctccaaggcctgcatggctacacacctggctcagtgcctcctccagatcccctcctgaggctgccccaaggcctacgggttaaagccaatagctgctcacatgcaacaacggaaggagattcaagagtctgccatcccttagcagcccctaagtgggcctctagagctgaagacacacccctggtgccaccagcctgtgtggcccctccccttggccctagctcccagcacctccctacccttcagcagcaagcacactaagagatttggcccgaggcttctcccttctgcaagggggtggtcccctatacccgaggaatctttctctagggcacctgggctcacagcctccctgggctcggttgttcctgctgccaagtgctctgtgaccatggcctttgcctagtggagggaactcagtggaggatgtgcccagcagtggccggggctgcttctgtaaccaaggtctggcagagtagcgattccctgcgtgttcaggaagggcccattgtgtatacctgcctcttgtcactggcttggtgccagtccctcagtcccacctctttactcggaccatggaccctgccactgccagctcttagtacagtcccaactaccgtagaccaggtgacatttgttgacaccattctcagaggtgttgaagatttatcatcttgaatcctccacaaatacagatacagtcccaagggaggtagtcgtagaaatggaagacgccagccctgcgcagcctgcagggacatccgccaggcttcccctcagcagcaggagcccaggtcaccctggttaaactgcagtgatacatttaggtgggtggggtcaaggcatatgtggcctccgggagacacctgcttggaaggaggcagtgatggagatagagccccactctgagtctgggctcagagtgccctgactgctctcccccaccccatccccagctcctcttgtcatgcttctgcctggcccccaagactgcctctgtcatggtcactatttattcttggtccctttttctttttgtaagaaacagtcacaagaaaacaacaacaacaacaaaaaacaaccaatgagaaacaatctgcgtggtgtcctgttttatattacaaaatttctcttaatatagaatataaaaaggggagacttgggagatacaatgataaattagctctgtttcctactgcaagggacatttacaaattccaaaatagactttagcatatgacgtgtgtgtgtgtgtgtgtgtgtgtgtgtgtgtgtgtgtgtgtgtgtgtgtgtatcagagttcctggggatgaaggtgctgggttcagaacccaggtaggccaggggcttgggacaggataatggggagcatgagccacaggtccagtcttagctcctcgcctgtcagatacagctgtcccttaggccactgctctgggacaggaagtggctgttctgctcactactggctgaggcatcttggggtgaaggaagagctcccctccattcctctgggagtacacagagcagctcaccaagccccaccaggatgacctcagacagccttgcaatggctaccagcaagctcagagggtgaagactgtgtctgtctggccccatgaggatgctgagaagctgggttgaatcagggctacttgggagcgcttcagcgtaagtgtggaaagttctggtgagggactctgatctgccctggaattgcctaggctccatatctggcttctcagtccctccctgtcccagccctgcccatctctggaagcctgggctagttctgggtggcagccgctgtggttgggctaagtcctcaacctagccatgaacttccaatcaatagccaagccatttgccttcctagacagttggagtccagtacgtgctgggttctgagtcagcctgggtcctcttagtctgggggtgcaagccagcagaggggccccctgatctggtgactcagcctctagggagcttactatggggatgccaattaagctgtcataaagacaacttccgtatagcattcagagacacccactccccggaaggccaggctgggtgaggaccacataaagaggagagaaaatgggagaagtagccccccttgcacccagacagcagaatagaacaggctatggctatgactcccaggtggcagaagggcaaaggaaggctggagttcaggtcaggctcttccatctgagagaggagagcagacacctagctgttccttccaccactgttccccttttgtgcccttggcagacataattaatcaaatttgagatcctgacagacaacactaatggattcaacacggtcctggcagggtcaggcatcttgcaactagttgctaacctagcctgcagttcaagtttgtgtgtgtgtgtgtggggggggggggtgttggttggttggttggttgtgaacctattagtctggggtgtttgtttgtgtgtgtgtgtgtgtgtgtgtgtgtgtgtgtgtgtgtgtgtgtgtgtctgttggttggttggttggttgtgaacctattagtctggggtgtttgtttgtgtgtgtgtgtgtgtgtgtgtgtgtgtgtgtgtgtctgttggttggttggttggttgtgaacctattagtctgggtaatctgagcctagagagactaacaaaataaatgttcagcaaaaggtcagaaggtgtcacggtaggagatgctgtggggttaagtctgcagacaagaggcatgaccttaacctctagaaaggagagagagtgaaggggtacacagacggaaaaatggaaaccccttctgtctgcggaggtgatggtgacatcagagcatctgaaggcaggaggctgagttgggaggtagtgagatccatccgtatgtggagggatgcaggggtgaattcttggcagggaccttgaagaacacattcaagcctcagctctgggtagaaagagagaaatgaacaatactggggtgtcttccacctgggagaacaggggtggggcatggcccacggggacaggtgatgtatcacagttggatctctgacagaggtacaagcagggcagagtggacacagtacggactgtagagctggatgcaggcagttcctggccagtttacatcggggtggagtcctggctggagcgacagcagcctggagatgaccttgtcatgcacatgctgtgtgactggacggaaatgaaagggccaccttctgatccagtgtccacacacagccaccctcagccagcgggagcagggaccgcttcgctctccagcagatggtgctgcagagtctgtccttgtgttgtgaaaagccggctccttggggcctgaggaccggctcctcctccaggatgtgtttctgcctcctggttgctctgatcctggaaatgctaagagaggtgatccgggccaagggacactccagtctgacagggccaaggagctctgaggctgatgaacctttggtctcaggaacagctggtcccaggccagccctaggtccttgtagagcccatgccccttgctttagagcctaggtgaggccccttcatgtctgtcttttttttttgtttgtttgtttgtttatttaaaaattagctctatgcttctggccgtttgggctggccttgcttccgcccctggggccagaggacagggaagagaaggggctggcttctgggcagtggtgggctgagtgtcttcaggccaaggcctactggatgccccggaagaggcacatggcaaagaccatgaggaagagctgcagagaaagggagaagatgatctggagtcagactgggtgcacgtcgaggggctgcccagcacacctcctgaggggaatcgtgattgtgacactacccggggcaagcatctgctcgccacttgggtaaaaaacaggcgttggaaagcaagtcatctgtttaaacagctcaaatctgtcttttttgggttggcagagactttaagcaaagcacaacccttcttgggcacctgagtgtgtaccgagagcttaccatgtaaagtaggtttccaatgctgttagcagcagcctttctaaccagcaggaagtgaggcatggagatgtcagagatgtcttacaacctgatttaggtcacacagcttcagtgggggtaacctagcttgagcagagacacacttccccccctccctccccccacccagcccttgcttctaagcccctgcgctctcgatagctcacctgaagctggtgaggtttccagaggttgcacttccctaaccctgacctgtggctacatcgaggcaaggctatgtgcaaatccttgaaatgtgcccagcctcaggaagatctgtgtgcctcttgttggtcttagctctcacaggaggctttgtccacttccaggagtgttggcacatacagcaggagcttaatatatgcatgtggaattaatgaatgatgcctgtacttctcctgtgacttacacagaactggtatcctgagagacaaggcacagaggaccctgaacaagggcacatcagagtgccaggcgaccagagcttccatgaaagggtccccaaagagcaggaagtgagggctgcacattaggctacctggcctcactgccccagagtgcatccctgaactgggcaggggggcagtgagaagggaatgctgagtagtaactcaaaagttgacagctactccgctacggtgtaggttctggggcactgggatgaaggattctaaagctccattgccaagtttaaaagacccctgaccatgtgcaaagtcaggactcatccagaagcccccgccttccaggcagcttgtggggtgtatcctgcaaagcgcacttggactgcagagctggggtgaggtgaggtgcctctctgggcctgcctgttcccattgtcctgggagaggcacagatccgtagctccaggccacaagaatggctctagcagcagacgtttgcagtaggcagcggctatgaatctgggaaataggctgagcgtacagacgctggggcttcctccctcccagggcccctccactcacctcaatagccagtactccaatggcaaaggctccggccaggtagacataggtttcgaaggtgttgaggatcactgtataacagccctgggaaggaaaggccagagatgaagccacggtatggaagtgtggtctgcagtcaggaccactgtcagtattgaagtccctggcatttggcctcagggctcagcagctgcaagctggcatttttatactgatgtgggaggaggaagcatctggtcagtggcagaatgtcaccaacatccctccctctgccgcatccagtccccaagacagtcccaaggctaactaagccacagacctagactatgaggagatgtccaaacactcaggcctcctggtgctctgtagaagtgggggtcagacatgcagggcaaagctgaatgggatggatctcttcaatcagaatgtcaaatggtgccccagccccaggtgggacagtatctcacagaggtgcacagtgccccaccaagtccctctcttgacctgcctggctgctgagggattgacagtccccctccccaggctcaaggccaggcagcccatcctcaaacattgctcagctcttttcccacagcctcacaggagcagctgccttcatgtgactcatgtgcctgcggtcccctggcactgtaggtgacagagccagatgagccaagacctctcccattgggccccaaagacattgtactctgtgtccactgtaccccactcccatgctggccacaggtaaaagtcacacacacacacacacacacacacacacacacacacacaccagtcagtgttggggatcagaccactgagccatactcaccccccagctctgactgaaatatatgcactttttggagatgggatctaggctacacttgaactctgtatagttgaggatgtccttgaacttctacccctggctttatcacctgagtgctcatattatccagtttatgagggattgggttggaacctagtttttgtgtatgctgcacaggtctactggctgagctatataatctcagccttttgaaacatattctttaaaaaacaacagtttttttttttcttttatgagcacctgaatattctttgggcccaactagaggacttccatgtggactggttggtggtggggcaggggtaggaactgtgcccatctatgtggggtatatattggatttcaggttctgatgaggctggggtcttgctgcttcctacatagattcccagtgtctttggccatgtggacctggggaggctatatctgagcacgcagacagtaagacctgatcagagactgcggctacatgggagtcaacgtgtcttctacgtggagactaactaggaactgggcaagggagaccccattgtccctggagcctcatagagtaggtggacatattctgcctagcacaagtgacctgagccgagcagaaggttggctggtggaaattccccggtgacagggaagcccttggcatgagtggacagtgtggacagtgttacctacacccagcatccctcctccagggtcttactaggttctatgtgccctgcatcatttggttctctgtgtagcccctactgagaagtagctcatctgtggtttacctccttgcaaaatgggagagagcaggtgggtggctccttcgaggccacacatagcaagggaagcccagattcaaagaggggcctgatagttctttccctctacatagagggggtgggaactatattttaaaatgcctgtcctcatgtggccaagcccctccatcggtgcctggagttgactatgccctgggtgtcaccccaccataaagcatccccatctgtcacagggaatggaacatcacttgctagatgcctgtcatagcacctccgatgtccagctcctgctcacagtcaccccaaaactaactagacatagggcagctggtcctgggcagcaacccctacattctcatcactagcatcccatcttaggttccaggatgagcaccccacctcctacctgggactcctgactagatatttcaaaggtacttcactctcaatgttccccaaacttcacacaccatgtcccccaacccagaaggcacagaaacacctttgtcacatgcctggactcgcattgacgtctgttacaaggccagtaattcacatcaccctcctcgggactgctgctcatgtagaactgtcttgacttcccagtcctacagcagccaaagtgccaacctagccacattcgtccccaaaggaactccatactctagaagtctggcttgtgccagtcacaaatgtgtcctgggctttgtgggaggcagttctggagataacccaactggagatggtctcccagtgggggctcctaacagaaagtatggctcagcggggatgggtgtgggaggaccagtcctgggagttagtctcactgggcctgaagaggctctgtgatggagaatcgatatggctgtgtggtcctcagtgcaggagccagcaagaggatgctcacaggggaaggtatcttgcggtagaagttcaggacttggggtcctggtcctgcattctggctgaagttgggggtatagcactttctcagaagggtgtgactcagtcaccagagtgtgctttcccttggttaaatgtgtgtggttccatggcctttgcgagagagcagaagcaagcttctgcctcactttcctgggctgtggcggactttctccagcagagtggtaatgaaacagggaggcttgactttccctgggcaggtgtcagcctaggcccgtcggcaatggaagcgtgaggctccccatatctttcaatccttcccaaattctactcgctctaaccatagatccctgcaatccaaaccttcatgcctgctctttccattcacatcccggggcccttcctcctcatttctgtctctttcccccagggtaggaaggcaggatgtgtgagagacactgcgctctggcctatcctagggaaggtatgaagtcaagagctgagctcttggtatcaaactgagctcatgggactaggtctcagcccagtaatgccctcccttggagcttcgagtaccctaagctctggcccatgcacactctagcacttcattcaatctgtcttcactctcagaaccaccgctgtgggcaaggatcacttcattcactggatcaccatctaccacctctccctagaccaggagccccatggaagctcagcctgtcccttgtgctctgtcagctccacagtgttttgaattctcccagaagtctgaccaaagaagaaggccaggtgtggctctccttctcatcccttccctcttcccatctgccacgcccaacctctccctgcttctctttatggacaaggggggttggggtagtgggggtggggatggtcctctggccagcaggacggaagggaccaagggtgaagtggagctgtgctccttgttgagggggacaaagctgagacctctgtttctcttagggcgaaggctaagaggaagtcctcagatttcaagaaaagaaagaactctggatgcttccctagttatctagggtcaggtcaataaaaatctcctcctcttggatcaagaagtgttcttgctgggcagtggtggcgcacacctttaatcccagcacttgggaggctgaggcaggtggatttctgagttcgagaccagcctggtctacagagtgagttccaggacagtcaaggctacacagagaaaccctgtcttgacccccccccaaaaagaagtgttcttacttggccagagtaagcttcctcataaatagagtatatgcctaaggagtgcctcccccatcttatttggaaaactcagcctggaaccacagaccaaattctcaccccagcctgaatccaactcatttcctctgtcagtgtgatcttctcacttctttggttcttagaggccaaggtagcctgtgccacagccagaattgtttacaaagctccagcccaccttcagaccctctgggcagacattgcttcccccagctttgcccatatttgagaagtgtctccccgcctggggaacccacctgcttgtttatgaacggattccgtcccagctggcactcctccctgctcagcaccactccatctcgagtctggggttccctccgacagcaagccttgggcacctcctcagtgtccagcgtcagcagccgaaacacggaggccagcttgaagtcttcaggtccgttgaccccacagcagccaaactaggagagagccgaatgtgggagctagtgagggactggaggggacatcagcctctgccagggccaagatccctctgccctgcatatgactgcggtaatgacctgtgttcctgagcttctgggtcttctctgtaagagggacatggccgtatgttccttacctcaccagcacttggtaagcagtgcacatatagatgctatgattttatattgtgctgtgctatttattatctttactccggcctgtgtataactgttcatatgcagatgtgtgtgtgtgttgtgggatcatgtgaacatatgagtggaagccagaagtcaatgtcaggtgtcattccttaggtgctgtccatcttatttttcagacagaagctctcactgggacctggggtttgtagattaggctaggctagctggccagtgagtcccagggatgtgcctgtctccacttctccagtgttgggcttataagcatccatcatcgtacctgatattttacatgggtgctggggaccaaactcagttcctcctactcacacagcaatcactttaacgactcacccaccccctcagcctctgtactgagtatcgctaacatcactcacaatggtactgcgtgaggacctaagtcaggggcagtggactgtgatccactagccttgacagctcggagtgctgtgcaaatgacgatgcagaggtcaagagtaggatcagtgattcttgatggattgttgatgcctggtccaggcaagggactaggagggctctagaggacaggctttttcatgtcacattatggctctgagtgttcacggcatcccacgataatatggggaggggcactcactgtgatcatgactgaattccaggtggcagagaaaacatccgtatcgttatcgccttggtagtgcttggtaagctccttggtgaagaactctcgggtgagctgaggacaaagtagagggtcctgagtcctcccagcctgtctttcccaaggtgatactaagctgttcattttgggcaggcaccctgttcccaaggcttggaactttggtgtgtctcatcataggctgagagaagcgtgtctgtatttacgggctcatctaactccaggatgggacacactgggaaccctgctcagccttgcagctctccacagaggatgagtgtgtgggtgtttgggagctggaggacatgattgcctgtcattctgttcttcagaatcaacagtcatggggcccaacctacaggaagccacagtgtgggtaaagagggatcccttcaatcacccatatctacccgctatgttctcaaagccactgttctcaacagcttcctcaggctggctccttgtcccaggctggcccatgtcttatccttccatccctcctgaagcccatctgtctgtggtacgaggccttgtcctctaggctcaggggaaggagctggctgaagcctgtggtgtaggctaagcagggagaggctggtagcctagcaaggcacacagcatgcccagactgggtatatcctctccaaccccatgactatgtgacacccatcatcaggccgtcactggggttggatagagattctaaaaccaagctggagcctgtaccaggtgctccaggagtggggacccttaggcacccctggtcggggccttctggaattacccctataggagaccccacttctctggaccccaatgcattcctgaggtgcaggttatgtttagacccaaggccctggatgagac

SEQ ID NO: 38 - DNA, 2480 bp, Mus musculus
ggcgagcccagcagcgccaggagtccagcttgccctgccctgccctgccctgcctgcctagcgcggcgccgcgatgtgagactccccgggccggagcgtccgcagggcacgccagctccgcgagcgcagcaccccgcgcgccaggaacgttgtgaggactgagcacaagagagggcccctcatctcagactccagtgtgcatctcagcatctagctcattgcccatctcagagaggaaactgaggcagccgcagcaccatcttctcttaggccccgggtggggcctggccacattcttctcaccctacactgggacctggggtctggaagtccagcaggaacgatggctgaggccagtgtctccccatgtccctcagcagaagaaaaaatggcaggcaaacagccccctccgctcatgaagaagcacagccagacggatcttgtgagccgcttgaagaccagaaagatcctgggtgtgggcggggaggatgatgacggcgaagtgcaccggtccaagatcagccaggttttgggcaacgagataaagtttgctgtgcgggagcctctggggctcagggtctggcagtttctttctgctatgctgttctccagtgtggccatcatggcccttgccctccctgatcagctctacgatgcagtttttgatggggctgaagtcacaagcaagacccccatccgcctctacggtggtgccctccttagcatctccttgatcatgtggaacgcactctacacagccgagaaggtcatcatccgctggactctgctcactgaggcctgctacttcggggtgcagtccctggtggtcactgccacgcttgctgagacgggcctcatgtccctggggaccgtgctgctcctggccagccgcctcctctttgttattgtcagcatctactactattaccaagtcggccggaaacccaaaaaagtgtagcaggctgggacctgcctgggcctggacctgggcccgagcagctggggacttcactgtccatgggtcctagacaggcctgcaggcaggcaggacgcacacacacacacacacacacacacacacacacacacacacacacacacacggtgtttctagagatccagttgaggacatctagcaaggggagtgactgcctcccttgggccaagttccccagcctcagcctgcacatctctctctttggcctgctggagggtactctgattctctggctggccgcctgcgtcccagagcaccagagtcccttcccgacaggctagggttaggcaatgtaccacaggcctgatagtccctggctcctagctgcccataggctcctagtgcatgaggaattctgaggagaggacaagtggggacatttcctcggcatggcctccaaggcctgcatggctacacacctggctcagtgcctcctccagatcccctcctgaggctgccccaaggcctacgggttaaagccaatagctgctcacatgcaacaacggaaggagattcaagagtctgccatcccttagcagcccctaagtgggcctctagagctgaagacacacccctggtgccaccagcctgtgtggcccctccccttggccctagctcccagcacctccctacccttcagcagcaagcacactaagagatttggcccgaggcttctcccttctgcaagggggtggtcccctatacccgaggaatctttctctagggcacctgggctcacagcctccctgggctcggttgttcctgctgccaagtgctctgtgaccatggcctttgcctagtggagggaactcagtggaggatgtgcccagcagtggccggggctgcttctgtaaccaaggtctggcagagtagcgattccctgcgtgttcaggaagggcccattgtgtatacctgcctcttgtcactggcttggtgccagtccctcagtcccacctctttactcggaccatggaccctgccactgccagctcttagtacagtcccaactaccgtagaccaggtgacatttgttgacaccattctcagaggtgttgaagatttatcatcttgaatcctccacaaatacagatacagtcccaagggaggtagtcgtagaaatggaagacgccagccctgcgcagcctgcagggacatccgccaggcttcccctcagcagcaggagcccaggtcaccctggttaaactgcagtgatacatttaggtgggtggggtcaaggcatatgtggcctccgggagacacctgcttggaaggaggcagtgatggagatagagccccactctgagtctgggctcagagtgccctgactgctctcccccaccccatccccagctcctcttgtcatgcttctgcctggcccccaagactgcctctgtcatggtcactatttattcttggtccctttttctttttgtaagaaacagtcacaagaaaacaacaacaacaacaaaaaacaaccaatgag

SEQ ID NO: 39 - protein, 245 aa, Mus musculus
LIAHLREETEAAAAPSSLRPRVGPGHILLTLHWDLGSGSPAGTMAEASVSPCPSAEEKMAGKQPPPLMKKHSQTDLVSRLKTRKILGVGGEDDDGEVHRSKISQVLGNEIKFAVREPLGLRVWQFLSAMLFSSVAIMALPDQLYDAVFDGAEVTSKTPIRLYGGALLSISLIMWNALYTAEKVIIRWTLLTEACYFGVQSLVVTATLAETGLMSLGTVLLLASRLLFVIVSIYYYYQVGRKPKKV

SEQ ID NO: 40 - DNA, 39556 bp, Homo sapiens
cagttaaacaccacaatctctagaaacctttcccagagaccctcgaagctgtgagtctctcagcacctgccaggcaccacatttctcccatgggtcctgtggtagaagaatgtgtcccgtggtgattcccaagccaactgtgtggaccaccttaacctctgattcccagccccagggaaaatcaggagattaacaatcagttcctttgggctggtaatattccttccattttacagatggagacactgaggtcctggatatttaaaaaaacaaaaacaaaaacccatatgacactctcagggagcctgggagtcccagagcttcagtccgattttctgcagtgactcagggcttagacaatcattacagcagcgattactccttaaattggttatttttcactgttgaagctgttgtgtgggccttttttttttttttttttttcagtttggattcaccaggctgggggagggagagattgaatgtgaggcaaagcagaaggaagagaaagaaaaaggggaggcgggaaagccgggcagcagagaaaggcccaggagtctttgggatttctcaccatggggtgggggagggggaggctgccccggacccctggggaggcaggagagagggaagtaggagtgggggcagggagatgacagcaggtggtggggcatagttccgaggttagctgcagccatgggcagttctaatcagcttcttagactcctgggatcagtgcctgggctaagggtgctgtgtgtgaggttgggggtgggagcgttgagccacctccactctcacagtctacccccaaccatctcccctccaccttttctcttcccacactgttcagatacctgccgtgtgcttggcactgtgctaggcacaaaggcatagcaggaaacgagatacagccctgcccttgagtagctcacagccagccctgggaacctggaacccagccgtcaaattcactacagggattggagggagctactggggtcagcttgcgggggtctatggggaccgagggatgtggcccaacttcggcatgaggcttgggggatgggcgaatgggggagagtgggtagggaaaagctgccagaggaaactttgtttgttttttgttttttgagatggagtctcgctctgtcgcccagactggagtgcaatggcaagatcttggctcactgcaacctctgcctcccaggttcaagtgattctctcatctctgcctctccagtagttgggactacaggcatgtgccaccatgcctggctaatttttgtatttttagtatagatggggtttcaccatgttggtcaggctggtccaactcctgacctcaagtgatccacccgccttggcctcccaaagtgctgggattacaggcatgagccaccgcgcctggcccggaaacattttagctgagataagagaagcatggtgaagagctggcagatgaagactggggtgtgatgggtaagaaaggtcaagccgaaggaacagcagggacaaaggcaaggtcctaacccgggacagagcccggaacaagaggggagctaggagtagcaactgctcagatgtctgtctcttgcactagattatgagcttctctgattcataactggggttgcattcatcactcgttttgtggatgtatctatgtctgtacgcatgcattcattccttcatttgttttagctggaataatctaaagcttattatgaatcttgcaggatgaagctgtagatctatgatggcctgtccccttaggctgccaagtcctgctgcacaggctgtgcactgcaccactccatctgccataggtgtagcaccctgcagccttgctctacatggtcattgataagtagtaattattctctccctctctgcatatataatccccattttctgttgtgtacactgagagaagggaggagtcctgctcgagttctcatggcctgggggagacccacaggaactctccctatctcagtatccccactgacacttactttctcagtaggcctagatagttgatctgagagcttccgggtcagatgcccttcctcactccaggaccatggaactgccaggcagagtgggcttctgtttactgccttgggctgaaaacacatatcagcgattggcaaaacacagggaagttgcagctcaacctgttagactggcaaatgtatgctatgcccttctcttactgtaaggatataaaacaatcacttatttatactcaggaaccagaacacttgggtcctcctgcctccccctgctcagccccaccctgaacagaggggctcccagaatgccctggggcctgtggcaatgggggagagaatggaaggggaaaaggagagctgccctgggacctttacggtggagggcagaaacattattaagtacctgctgcatgctgacccttaactgtttttcttctaattatcaaaatagtcctgtgaaagggagtcagaaacccaggggacagaaggagcacggtttgaatccaggctgtgtctcttatcagctggagacttgggagagttacttatctttttttttttttttttttgagagttacttatctataaaatggagataataacagcaactacctccacagggccagtgtgcagagttcacgaagccacccactgcaggtgcttggcacagtgcccagcatatagtaagtgttcagtaaacactaactagcatcatgagattcggggttgctgtgagccctgttgtacaatggagaaacagaggcccagggaggctacagaagttgccagaggccacacacttaggagttggcatagccagaggtgagtgtgtggagttttgaagggaaggtctgaagactgtcactaagcattaaatccgcctgaggcttcaaaccttcactttaaattcacccagtgctgtgtgcccagccttgcactgaggggtgagatggagtggctgagtgaagaagatgtgttaggctccttggagccaccatcccagagcacgtggcctgatggggacagacagaagatagtagttcccatgaagcagtgtggcagatgctgtcaccagctgctcccagagctggaagaggtagcctccaaggcttcctaggatgtgtggggggtgtgagtgggggtcggggagggctgggaaggacttctcagagatgcctggtagagggctcagcgtttgcaaaggccaggagggttgaagtaccacagcatctggagaaactgtggcaaaaaccgatccgtggtggttataaagaccccttgtggcatccaagggaaaaaaatgtgggcttcgaagctgacaaatttggggattcaaaaccctggtacatgaagccagccctttctgggcttcagttctccattttaaaaatggactacctcacagaggttgcccacagaagtcgcgcaaaaagttggtcatttctctctctcccccatcccagggtgagagtggggcaaggatgggcggtggtgagtggcggaggggaggccctgggtcagccctggggtcctctgggtctgcagatctgcctccggggtcaattctcccgggtgggcggaggtctgcgccctgccaaaccggtgttaacccgccccttgaccgctgaccggtgcgtgggaggaggagagcaccaggtgaagggctgatgactctccagcaagtgttccctccatccgccgccggctcggatccccagagacccggatcgcagcttccctgctggccgagcccccagcacccgcggcgcgccccagccctctgctcctcctcggagcaattacataacgacgcctctggtgggtggcggagaggccttctttgttattgcgatccgcctcggcagcggccccgctgtattaataaaccgatcactcaaaacgccagcctgggctttatgtatgtagatttgggttggggcgcctccgagggaattatccacgctgcccgctcctcacccaggagggaaggaggtggaatcccttccctcccctcccctctggtctttcaccctgcccttcagctcagagtccctcccccacccaccttgctcagcagcccggtcccaggagggcaaacaagaatattccagaatcaaaaagtgtgggttccaggcccatcttcacttccctgatgggtgatagctggcaaatggaaactcattagccttacctgtaaaatgagccgaataatagcaaagtgcccatttaaattagataatctaggaatctgctttgcaaattctaaagcaatggttctcaatctttggcttgtatcagaatcacgtggggggctgttggacgacagattgttgcccctgtgacttcctttcccagagtttcagttgtctgaggtggaaatgagaatttgtgtttctaacattttcctgcccccaagtaggctttgagactcatacactctaaagagatttataaactagaatctatttgtcagatgttcctgtcggtccgcaggtgacttactgtccccaaactgtatggcttcactggggtgggggtggtccaggagtggcaggccttacaagggatcagcaatgcctgccctggccagcggcagcaccagaaccacctgagctctgggccagactgccagggttccagtcccacctccctgctttctagggtgtgatcttgggtaagttatgtaactcagtgggcctccgttttgccatctataaaatgggactagtaatggtaccaacttcgtgagatttgttaggattaatgacatgtaagattctagaccagcgtctggtacatagtacgggctcagaatgctattttttgaaataatgataaagcccctggggttttatcattggacaggaggcaagtgaagcggtggccattggcctagccggctgcccagggtccaagactatgatcccacagcccagaatggctgctctgggcactcactgtgaagaggtcctgggggtcgcccaagatgagggtccaaaatctgctactcacttccctgcatagcaattcttttcttggccagggctcagcactctgaaaatctggacccagcctgaggttcttaagtcagctatgctgacaaggggtactccatactccatctgccctgagttttggaagccgtcccttcagtaccagcacagagcaacagtgtcccaggcctgcgatacaaggtccacagacatctccccgactctcccagctggtggagggtggatttcttgcagatggccacatgcacacagctcaccgccatttccacatgtccattcattaattgagtcaatgaacattcattgagaactgactgtgagctccggactcacatgtactatctcacttaaccccccaggtaccctatgcatcatcatgattttcttctttccatttggcagatgaacacgctgaggctcagagacactgagttacttgcctaaggccacagagccggttagaagaggactaggaccttgaacctaaatccaggatggttctagtggctaaatcccactctcatactgcctccttgagccctcccccacaggaagcaggaaagggctggccatggtcttctggtcccctagctgtcatacactttctttggggagatctgagcctcatttcttccacccccatcctgatcagttctctctcccacagataagaaactgcttgacatttcctggtcctggtgtagcaacagaggtggtggggatgagtcactggagggaagcagctggcagttgtgtggggtcggggaaggagggctggtcagtgctcactctggaggggtgggggcaggaagcactggggaggcctgcctgggagttcctgagctcccagctgctccttccagtccccaaagctatgtgtaacagagttctcctcaccaggcaggttcacagagaacgaagctctggaggaaatgagaggaaaccaggaaggggaaccagaagcagttgtgaaagcccagctctctgcctcagtccttgtgttgtgggatggaggctccttctctctgggttttgtgccagcttcaatgaaccctggctagacaactctcaccccagagctccctgttccagttgagaatgcaccagcactcctgaggccctctccctccgctcctcccaggctgccgcataataacaccagtggcactgattgataactgtcgatgtgcctgccccatgttaagggcttcacgtgcagcctctctgctaaacctccaataactcccaccaggtaggccctgttattatcaccattttacagatgagcaaactgaggcctagagaagtgaaatcactggcccatggtcccataaccaggacttgaacccagatctgtcaggtccaaaatccctgggctcaaccacaacaggtctctgacaacatcatgttcctccacacgtgcccatcagtgctgaaacctttcccctggccccaaccccaaagactaggcccaacccccgctccgcaggcctctctcctgcagtcccaggtgataacagtagtctcactccaagcatctttgaaatccaattacatccccattcttcctcgtccatagtggtttctggctgcagacactggcaatccctgtgcccaccacaccttcctgcaggggcacaaacacagacacacaggcgcactcttaagtgctcactcacacctggccaccaaggaggtgttgctgcccctgcttgtggagggcgaccagggcagatggagcccctgctgctcccaggttcctgtgggagtctggaggagtgaccctcccacccctgcaacagccgctggctgcttcctggctccatccccaaccccactcccatccccacccccctggggccttgagaggaacacttcaccaaggtaagaatcacaataataatgtcaataataggaatcagcatttccagtttgcaaacctttttcatcgaatcacctcacttgactctcacaagttctatgaggcagatatttttatatccgtgcaggcgagggtcgtatagctacttaggagcagagccaaggtcctagccgacttatctcactctcacctagaataatgatgactcctcattgttaccgtgcaccaagcatctattcttgcctgtcgttaggggcacacttaatgaatgtcaatgttactcctcacagcagcccagtgaggtgagttttttttttatgcccagtgtaaagatcaggtaactcagaagagttgagggcagaatggctgcctaagggatgtttctgaactggacacatcactttagaaaagtatataggggccgggcgcggtggctcacgcctgtaatccccgcactttgggaggccgaggcgggcggatcatgaggtcaggagatcgagactatcctgactaacatggtgaaaccccgactctactaaaaatacaaaaaattagccgggtgtggtcgtgggtgcctgtagtcccagctactcgggaggctgaggcaggagaatggcatggacccaggaggcggagcttgcagtgagccgagatcacgccactgcactccagcctgggcgacagaacgagactccatctcaaaataaataaataagtaaataaataaatgaaaagtatatagggaggaagacaataagagcctctaatgggtgctttctggagagcggatgcagggggttatggatagagccagctgcttctcccctggtccccctccaagcactttgcctgttatcttgagcggttactgttgctgctgttgactatttgtgcagtcatctacaagggggctgtgaactctccaaggacagggacactgtcctgttcacccctggggccccagcacatagcaccttgcctggcataagggtgaggcactgtcaggatggcctcgttcacaaaggatggtggggcagccttggcccagcctgagctcccagcctccccagcttccccgttgataaggagactgagagaagacagacacccagagggcaaaggttatccactccaaataccacttaaggtgggaattcttcctctgctgtcctcatcaacccttccctggattctgcttgcatgctgctagtgacagggcactcattcatgacaactaaggcagcctcttccatgttggaaaacttggagtgattgtgacaaaggcctcccactgatgtatgatcaggctggctgggattacaagcacagaccctgctgctagtctttagggttacaccaagcagagcactggcaggtgtccccaagtctgggaggacattgcacatgaatgacgctgggggccctcccttcagcaatccagagccctgagtgccagaaaggcagaagagggagtgacaaatgaattcatcaacccagcttggcccagctctgtaaaggcagtgaggtgagactgagttgttgcagaaattactatagagccttgagtcagatggctccacccaacacaccttaaaaataatcctcatctagagtcacatactttgattgattgattgattcattcattattggctatcactgtctaggtgtttggctgggggcagtgtcagtggcactggggcatcagagtttatctaccttagtaatcaggacagtttatattcactgagcacttactatgaaccaaggactgttctgtttacttccttgccaagggcacagactctcctgcccaatcccagctctggtgaggacagtgggagcctgcatggcacagagtccatgcacagtaaacatgagcagctcctattaactctaaatctctacagcaaccatagccggttcttactattggttgctctaggtgacttactttgtccaaggccacacaggcactaaaaggcagagtcaggatttgaacctaggtgatctggttccagagcctgctctattaaccgttaaggaactggtgcagacagaaccgagacctggagtcagaatgcccacctagctagatgcctgaggcagccactcacctctttctgtcttatttacttgtgaaatggagcatgtcatcagccttgccttccttttcccgcagccccccaccccggttcctggcccactgtgaccatcagatcagatgaaagagatccaggcatttctctaaggagagcacagggtggtgggggttggggtgggagagagcacattattttcccaccataaggggttgaaggagcccagaatttgggggtggggccttgtctgtaggagcctggttctctcaggttgacacgccaccagagagcctccatgacccccaaccctcatcctcaccccagccccccataggatgtgtagagacaaaaggtttgacaactgtagcgccaacaagcgtcctagagccccagataagatcctagcctcctgacagcgcaactgacagcagcatctctgaggctggattttagggtggagtatgaagaaggtggccgtagtgacagtggggtcatgttatttggtcaagtcacaccaagcagggagagagaagggtgggcctaggctggaagcctgaaggctgagtgaactcaaactttaacgaccatggcctgtaaaatgggactaagcacagcgcccttatgggttgctgtgaaaatcaaatgagttaatacttgtaactcctttagcatatggtgtctggcatcagagagtgcgcagcaaacggtgactattgtcgtgactgtgttattacacacttgggtatcaccgccagccaaagcagtcccttccatttcaggcaccggcctgggcccgggagacaccgcaaggctatttaagatggtgtggtttgcccatctacgttgatcgtcccaagaaaggggcaccgtctgcagaacttgccaggaaagtcatcctgggcggcgcggccacgccagagtctccccgcgcggcttcctcccccggcgccttctttcctcgcgcgtgcgccccctgcaggcggcccccgggagagcttcgcgggggagccgtgagcctggtttccccgccaacccccattcccgccgccccggcggccaccctgggggcgaggcagcccggcgcgtgggaggggacggcgcgccattggcttgtgcgcggaaccgagaggagggaccagcgcgggccgccagactcggtaagccccggccgcgcaggcgccgcgcgcagtccagccggcccggccctgccctgccctgccctgtcctgccctgccctgccctgccctgccctgcactgcccggcccggcacgggcggcgcgatgtgaggcgtccgagcccggagcctccgcctggcatcagctccacgtagcccagcgccggcacgcgcgaggcccgtaagttctgctccccgccgccgcttccgagccgcggactttcccctcccgccgcccgccgcctgcgcagcgcaacccagcggggctcctgcggccgacgggaccgcagaggggcggccgggaccccgcgcgcgctaaccgggcgccccgggacatctcggcacccgctgagcccgctgggaccccagggggtcgcctccccagctccccaaggcgccgtcccgcagccccttccgtctcccctgcgcgctctcccctcgccgcccctccctctgactcggtttcccctctcccccggctccgcggtcgccctcctcctggactgcttatttcgtcctcggccactgcctctcgggctcgagctttctgcttcggagcaggagagaaacggagcgaaagcagtttctgtctccccggggtctgactcggtcccccgcgctcggttctctgtcccctccccctcccgccattgttcccggcaggaggagtgcgcggcgcaaacttgcgagttcccccagtctttgcccccgcagggccgcggacggaggtggtggcggagttcccgctgcccacaagtctggcccgaccttctggggtgggggcctgggggcaggggccctgggccggagaacccggggccgcctaacggctcggagctcaccgccgggggacaccggcgctgaggcctgggtctcagaaagtgggtgagtgtctggagcggggacatcagggacagattgcagggggaggggcgaggctgagagagtcccccgtccccaggctggaaaggggcgggcagaaacccaggccgcgccttagcccagttagggggtgggtaggggacgcacaggtggagacgccccccactctccccaaagtcgcgcgatctgcaggaagggtacagtgtggggccactggccgggcgctgggtgggttagggcccctgccgtgggcagaacactcgcacctacccgggggaggctgtgtggaggaagggccagaacgccgcgcccaccccggcgcgccccgctgggcggggcggggcggggcgctcgccttgggtcccctcgctctaccttccttcgccctgacccagtctcgggcttccgcctcttcctggagcccggggggagtgggtttctccgccggagagatggaggctggggcaagagcagcgcggaggccaagaacccccaggctcctccaaagcccagagcggctggccaaggccccctcaccgccccactaccctgcacttcctgattggtttctttcaaacaaacttcttgacggggcgggcctgcggggagaagtcaccggggctgcccaccccaactatgtggtcccttggacctccacccctgacggcctgtggagaggggaccaggatctgcggcccgcagatcccagggacgcgggggtcgttttgttgcagagccaggagggggcactgtccgctccttagcctcagccccagacttcgagaaaggagagaaaagatttttcttgttgggttgttaggaaataagactattctccaggcttctgttgtcccatctgtaaaatgggtcgtcttgttcctgaggccccctctgtccccaccatcccaggaggcccctgccatggccgcttctttcccagtcacatgtcgtcaacttcctccgtgcttccaaatttggagtggagggctaaggccgaaagccccttcacccatgtccagctgtcatgacctgccagttctaggactgcgacctattttctgcacagctctgcctccaggccccttgtggcttctccagctcacacccagcctcccaatttcttttgatagccccacctctgtgggaagaagggcctgcccctcttggggtatgggggaggagggggctggatttaacaggaatgccccatagtcacacagtttggggctgttctttacttttgcttattgaacaaaatgtttgtgagcattacaccaaaaatggcttatggagcaaagtgccagggacagtttcaggcactggggagacagctgtggacaaaataaaaatttttgtcctcatggagctgatgcttaaaagcagggggcagggggaggcaattccctaataaaaacaataagcaaattatatagtgtactgagaggtgaaggggaaaagttgtgttgggggtattgaggccagggaccgggttgtcattttaaatagggtgtcagggaggtctccctgaggaggtaacttttgagctacagccttgagggagatgagggagtgagctgtgtagacagctagagcacagcccatgcaaaggccctgaggctggaatgtgcctgccctgcagctagcagggagtgaggggctgaggaagagtgagtgactgagaagggatgaattcctcccctttcacaggtgagggaagtgaggctcagagacagtatgtcagtcaccccaggacacacaggccaggagaggcagctgcagggcggggtgcctgatgttctgactcctggtccacgatacctccccggcaccctgtgtctcactgtttatcctgctacactggctggacccctcccagggccagcgcagcatcgtcctcctgccccaaagtgacccttgctctctctcatcccacttccttcctatgaccagtcccttctgagcacccaactctgacctggcacatgatccctagaaggggacctgctctgaggcagatttggtcaagggggcaactgaggcaaggaagtagagtcttctagtctaaaaataatgagcagcattattattgaacattaactacaaaacaggcgctgttctggatttttttggtgcatcttctcactggtgagaggttggtgtcattattacaccccatttaacagatgaggaaactgaggcccagggaggcagagtcactggcccaaaggcatacagctcatcagtggtagagccaggatggagcacaagccttttaagtcatgagctagtcctttaaccactaagccagcaccccaggattggggagacactcagtcctggactatggttgtggcccatcttatcctgcgaaaagggcagggacccttccacctgcctcccccaactcacccagaagacaaatcaccgcttgcttttgaagaaacgggctcaaaatgtggagcatcccttcgaggaagctcctgtcctttcctctcccttcctctcccaccctcttctcccctctaagttcctgaacagccacggggtgggggaggggcatggggagagtggggtgcaggtcggagagggaggtgcctgctgcattctcaccagacccctagcccgataggatctggaagtcaggctgtcctgatgacgacaccagctgcccttgagggccctgacatggtcactgggccaaggggcaggctggcctattctcagagtcgaaaaggacaggaattcttcatgttctgcccatgtgaatgaccgtcgagacaggaaaaacctcccagtgacttctgagcggtgatggaggccatcagagggcctgatccccttgcccacagcagcagcttcagacccccgggggaggagcccaggaatgcctccttcttgccacctgctctgccctgacctctcgccctcttcagcacagtaaggaatgttcatatttgtccctaaagctttggaaatgtttctgatgaaaggttgggctttcctctgcctttctggaaattgggccccttcaaaaagaaagagtaggaagataggacctgtgtgccagtccaggctgaggggtggcgggtcttggggatgaggcagcttgagctggggcccagcagggacctggagtgtggccgctgtgaggcagggctgggaggggccctagagaccacattctcattttcttagacaaagaaactgagccccaaagacagggcctggcttaccagtgatggcagaatctgcctgtgacctcagctgtcctgtctccgagcccagtgactcaggacacactgccaccttccagctccaggacaaaccttccactaccagatctcagggcacatgttcctggaggttcttggaaatggggcgtggaacctttctcaactgcagagctgtgtcatggagacgggggttgccactgccacgggactcgcatcctgcgcctgcctctcccggccagttccgctctgtcctcactctttgcagcagcctggacactgagcccagtggtgatgctgagatgatgaggaagacggatgctgcagctccgccctccactggctcaggatctgcttgagagacaagactgactaaggcagccccagcctttggaataatgatgctctcgagggatggcctgatagcaagccagctggagccagccaaggcccatccaccgggtagcctcgcctcagcttcctccttagctgtgggcctccgatgaaacctgcaccccagaggccgctgtgaggatgtcagtagtgcagccgctttcataaagcctcttttgtgtcccatgacttctagattagctctctagcccccggacagccttgtgactcagggaccaccgccccatttacggtggaaggaagggaggctccttcaaagaggagtttgtctgcccaaaggcacgagcctagtagtgcagagccaagatctgaacacaagtcccttagtccctaagcctctccagtacagccattgacaagtggattcactgcctgatggcccaggcaatagattctgggctaggggatctctagactccatcctgcccaaggggccgacggcagccctgggagggaccgcagctggagcggatgacgcaagctctggaccttctattccgtcccgccctccagggagcagagattctttctcctgcctccccttctctctggccgggggcctgaggctctggctctcactgccagcaccccgccccccaactctgtgttgccctgtcccagaccccatttccagctattttgtactaaagcgataacagaacaatgggtctccctgcatccctccccaagtcctgctggagtcgcagggccttaacccaagggaggctggaccccagagaggagtccagatgctggcgaccaccagggactttccgggggagttgccatggggaagatgggttagagctcagttcacgtccaccaaacgcccccccacccccaccaccgcacacattgcacacacacatcagcttctcttaggatgtccagttaaagaacagttaccttggcttgaattccagctctgccacttacctcaagggacactcgaataagtcacatgagccttcgttttctcatgtgtaagatgggggtgataatatggccattctcatagggttgtggtggggatagcaggggattcatggtcttgaagtacttgccccgctcctcccagccccggggtaggtggccctgggggcagtcttccttatgaggggtggaggaacaggtgtgctgcctgcccctatcacagaagctcttgtttggaaaggcagtggctccttggctgaggtgtgcagcagcagtgactcccccttgactcacagggaggcttggccactgatggatgttctgggccccttcctcttccctccctcatcttccccactcccccagccagtcaggtttcctaagccagccctcacgggcatagtcttcatgctggggacagctcggcagtccatctgtttctatagaaaccaggcttcctgggaaagagacagggggttggggaagtcctccaggatctgcatgggaatgacgcctcagtcccatctgatctggccagggcagagcctgggcagccaccttattcatgttattaattgctgtcctttacagagtacacaccagaggccaggctcctcagctgcactttcttatcatcacacatcacaaacctgtgggctttgtacagaagtagtagtctggtttcacagatgaggacatagaggctcagagaggttaagtaactttcctgaggtcacagagcaataaagaggagcagggatttgagcccaagttttcccaatcgttacaaatatgcttaccacctccctgtctgtcatcctcttctgactcttgtatccccaaaaagcccctctcttcctggctggtttagtcttggggactttgcttgttcccgcctcgcccctgggaagcatgtggaggtgctcttccctggcctcagattccacagcagatggggaggtgggagggactgcagggagtcagatcttggctgaagagggcctcttagctcctcccgactcattcattcaatcacaaatgcctgttgaactcctcctgtgcccggagttgtcccaggctcagagaacaagacccaaagaaatccttgccctggggcactcccctgcgagtgatgccacagctttctgaggaggtggggcaatgtcagaggccagtgttctcatccagtcctctaaccttcacggctgtccagaccccccactgccaggtcctctgccaagagcatttgcaccccatctcctggagtcttcagcaccccatgagtaaggcaagtaaggcgctgtggtgtgatccccattgtattgagggctgagactgctcgcttaaggccacctgaccaacagagagtggccacttttgaacccagttctgcctaattggaaagccctttcctgccctatgccaccagcttccatgtggcctggggcacagcctcccctcagcccgccacgtctaacctgtgggcttctgagtgtgctggttgggcttagcctgacagctgctcattccacctgtgttgacaaagtgcctgctgtgcaccccagcctcacggggagatacacggaggagcacagtacaagccataccttcagactggttggtcttggggagtcaaactgccgtgaaatgaccaggagtagaggctataagtggccagtggctgcagacactgagacccgtgagagtccagaggaggatgaggacccagtgccctgggagggccctgggaagaggggctgtgtgcaagatagcctggaggaacaaggagcatggtggggggacagagtgtcccagggaccttctcacttgtgtaaagggtcagcaatgagaaccactgttgaaaggtttgctggctgatcgggaatgtgggcgagagcagctggcagggcagaagggaaaggttcaggatcccaggcctgggccctaggagccatgtcctcccttcttgccagacaggtgatgtgggtggaggagtggctgtccttgctgcccctgcccccagcctcctgcagcctggctcctgggggaaacccccgggggcccttcagaaggcagtggggcagagcaggaagcttcacagcactgatggcaggctttttccactgtgcacggctgagtggagaaagggaagtggaaggagggccagactcctccctgggcagggcactttccccatgggtgcccacgtgcactccttctttctctctccaccagcacgtctgcgaggtgagcgttctcactacccccatttcacaagaggggaaactgaggctaggagaggtgtagtgacttgcacaaagccatgcagctggcaagagggcagagccaagactcaaacccaggtcccctgcccccaaagccggggtttggccatagtgcacggtggagtcttctgtcctcacttaggcctgaaataaacacctggagtggccctgaaggggaggaaaggtcaaggggagacctcaggggtgtgtgcagcttgcctcgccagtggggcaggtgaggggctgctgggtggatctgatcattgcagggcccagtcctgggggtgaagtaggggtggagcgccgttctcagagcagttatctgtgctggaaggtgggtgtggggccctcctccctggaggtcaagattccattttctctgtggggccacatgggccctttgtgagtgatgccctccctgctagggtgggcttgggaggtgggcacagtggttcccaccagctcagatgtctgatggcagtgcccgtggatgaagattgtcccacccatgagtaattctgtccaggacactgtagtgcccactcttcccagccccagcaggtgggcactgacacgtcccacagccgttgatttgcagcagctgttgttgactccgtcctgggatgcagaggggaatgctctgtgtgtgtatgtgtgtgtgtgtgtgtgtgtgtgtgtatggtgtgtgtgtgtggtgtttgtgtggtgtttgtggtttgtgtggtgtgtgtgtatggttgtgtgtggtgtgttgtgggggtgtgtgtgtgtggtgtctatggtgtgtaatgtgtggtgtgggtgtggtgtgtggtatgtggtgtgtgtgatgtgtgtggtgggtgtgtgtagtgtgtgggtgtgtgtggtgtgtggtaggtgtgtggtgggtgtgtgtgcgtggtgggtatgtgtggtgtgtgtgtgttttgtgtgtgcattgtgtatggtgggtgtgtgtgatgtatgtgtggtgggtttgtgtggcgtgtgtgtgcacgtattgtgtggtgtgtgtagtttgtatggtgtgtgtgtggtatgtgtgtggtgtgtgtggtgtgtatgtgtgtggtgtgtggtggatgtgtgtgtggttgtgtggtgggtttgtgtggtgtgtgtgtgcatatgtgtgtggtgtgtgtggtggtttgtacggtgtgtgtgtgtggtgtgtgtgtggcgtgagtatggtgtgtatatgtggtgtgtgtgtgtgtgtactgtgtgtgcagtgtgcgtgtgtgtgcatgtgttggtggagaggggtcagcaggcagaggaaagcaatgcatccaatgcctggaagcttctgcccctcggaggtgggccgtggacacagcctgggcctggtgggcagtggctgagcgccagccttgtgcccggggactgagatctggggctttgcccagtggggcggagaagttaagaagtgttagttagatccatttcctactcctccatggcctccatcctggtgccactgccacatgggaggcctggggagggtggcagtgtctgtgtctgataattgcctgtcttcactggggacttgctgtgggccaggcacttccccatggcttcatggagattacagcttttattctcacagtatctctataagataggacaccttattttcccaactacacctgggaagactgaggcacgtagaggttaagtgactgacctgcccacgggcacacagccaggcagtgatggatctgggattcaaatccagggagcgtcctcagcagttaagcacttacccattaggccttctggcttgagcagtgagctggctctttctaaagcactgtctgtccattattttgtttctcctgagaccagctgtaggggaaaagtgaggttggctgttttcgtttcacagatgaggaccccggagctcagagaggaaaagtaacttgctctaatcagtggctagcagatcagcgccccctcccccggccaaggctgggagctctttcaggatagggggcctgtcccaccacccatgtaccttgctcacagtagacctcactaagtgcggattcctcaggcaaatgtgcaggtgttttgctgagtgctctgagcttttctttttgccccgggctccctaggaagtgggaatgatggctccatttcacagatgaggaaaccgagactcagagcacaaggccacacagcaggaagaggtaaggcaggactgagggaggcagcacgtctggcctgggagaggggttaaccagccaggaggagctcgtagaagggctgaaataaagaccgaccttaccgagtgttggtgaggatgtggaggaactggaacactactgcattgccagggacacgcagtggcatggctgctctgggaaacagtttgatgctttctctgaaagtccaacagggatgtaccacacagctcagcaattccacccctggcatttacatagagaaatgaaaacttacggtcccacagaaacgcgggtttgtagcagctctattcataatcatcaacaactggaaacaacccacatggccttcagtgaccgaatggataaacaagctgttacacgtaccccagggaatactgctctccaataaaaaggagcggactcttgatacacacagtgacttggaggaatctcaaaggcattctgctcaatgacaggagccagcctcaaaaggttctacgctttatcattccacttacatggcatatttgaaaacacaaaagccatagtgtcagagaatagatcagtggttgccagggtggaggagtgaggggagggtgtggccagcgccagggagtttttggggtgatggaactgctcgttgtcttgatctggagctggtggctacaaaaatctatacgtgtgctaacattcaaataactgcacaactgaagcccatcaattttgctgtatgtattaaaagataaaaggccatggggaggctggaagaggaagggcgtgggccaggcaacatccttggctgaggaacaggtgaaggacccggttctcaccagtggcttagtgactttcagggcagcctcgcctggccacgggagggacgtggctaattgtagcttctatctgggttcaccagaaggcagtggctagcagctgaggtgtcaggacggcgtcctgggccctccaggagccgggtgatgaaaggttaggccctggcttccctggcagggtagggttggcctcctgtcctgatggctggcacacaccgaagcattaaccgggagtctcttgtgtgccgggtgtgggactgccgtcacagttaccacccgccgctgtctcctttcaccatggggcctgtgtgtggggaggagaaaggcgtatccactcctttttgtggatgaggaactaaagccagggggcgtaggagggtagtttggcctggaaatgacatcacactcactaaagaccgccaatagcaacttttgcagtttttttcccaatgcgacatggtatactgcctccctagttgatccggtctacagccacattattcacagaccccacagtttgaaactgtgttctgatatttgttcgggtgctttattttaagacaccaggaggctcaaaaatgggaggtgacccggggacatccccgcactctgcctctggcagccctggctggggcaggagggtgagatttgcctggggccacagggcactgagacagcagggtcccctgctagagggcccagtggcttctgaccctgtctgtagatggggatggcttttctgccttgccagagggtgggtgcaagtgggaatgagattctggaagtggtccgaggtaggaagtggcacgaccgttattcaccttggttggcattgaaaccccgggagcttggtttcctcatttgcagcgtggccgtcaatagcgcccatcttgcagggcagctgtgattagagaagccagggccaccccggagccagcctctgaggcttcacctcaccccgtttacactgctgtctcctctgcatagatttggctgactgaggacgcgacaggtactcagcttctttctgcatctcagtcgcccagcacaggggctggcacgcagtaggtgctcccaacctggtccaagatgttgctggcggtgggggagtggggggctggggaggatcatgggcagacctggggtgccgggaggggctggtggggggctgatggccgggagggcaaggcctgagcagggaatctagaccaccttagtgtccccgtcaacacccctggcagccttctctggctctgctgggtatgagggcaccccctccccttctttggtcttggcaggtttgaaggggggtggcagggagacgggagaggggctcaccggcttgcaggattgggcagaagtttggtgggggcccaaaccccagaactcagaagcccctgccccaggcttggacagaccctccccttttctaaacctcatttgccccatgaatccaggctcctttcctccccatccccccaggaagcttggatgtggccgccatccagacccaaatgccctctcctgggccctgtgcctccagggctggctctaaggcaccatgcaacctgtcagatggggtgtgctgtgtccacctacagcagaccagctcccagagcctcaggggcctggagagcatttcctcaacccatttgacaaggaagccagctgtactccccctactgccctgggctcgtggggaggcctcagcaggcctggtgtggggtgtggccttccgctagtcaggccccttcccctagggtctggaagctgggtaggaactgtggcctgaggccggtgtctcccctcagcccttctgcagaggccgggctggaggagaagatggcggccaagcagcccccgcctctgatgaagaagcacagccagacggacctcgtgagccgcctgaagacccgcaagatcctcggcgtgggcggggaggatgacgacggggaggtgcatcgctccaaggtggggtgcagagcaggggcctccggcacccactggggaggccaggctgacccaccattaggggagaaggttagcccaggcccaggtagccgcaggagttctaggacttagctgattttcctagaaatgtaacagcaatgccaggggaataacgagatcattagaattaagtgcctattacgtgcccggttttccagcagttgctttttaaatcttcttgttggcactagaagatgcagatactgtaaaatcattcacccattttatagatgaggaaacaaaggctcagagaggttaggcaacttgcccaaggccacaccggtaagtggcaggaccaggcttcaagtctgcatttggcagagccctgagctttcatacgtcaccatcatattttcagcttcttttaaatcctagtgtcaaggggaagcaggagagggggtggcctcatgtgaccctccccacctgggggaacctttggccaagctgaggtgcccaggctggtccctgggtgtgcagggctctgggaggatgagcgagtgggggcgctgagagctgccctcaccctggttgcctctgaccccctctgtccacagatcagccaggtcttaggcaatgaaatcaagtttaccattcgggagcctttggggctcaggtgagcatttacctgactttttgggggaggggaaggcctgcggcggtggggcagaatgcataagacctcacctcatttggcctggtccctggattttattttgtctcattaccttccccaaagctgccatccctggggatctgggctggagaggggagggtcccctggggcagggctgtgatcttctttccacgcctcccagggtctggcagttcgtctctgctgtgctcttctccggcattgccatcatggtgagcccccacccccagcccctgagatctggccccgtgtggctccctcagcccttctctggctcaccagaggtgcctcctccatcctggcccctcgtgcaggggcccatctgtcaggctctggggctgcctccgagaacctgactcctacactgccacgcctgtgccttctccaggagcacactagatcccatggtttgtggcctgactccttctcccaggaaccctggagttttctgtcctggcatgggggcgggtggggacaattgggtccagaccctggactgcccccaaggatgctgatcctgctcctggcggggaaggaagacgtctgtgggaagcatcagctgtcaccccccaccctctcccaagcgggacctctgagcccctctcgctgcccgcaggcgcttgccttccctgaccagctctatgatgcggtctttgatggagcccaggtgaccagcaagacccccatccgcctctacggcggtgccctcctcagtgagtactgctggggcgggccctgggggaggcgacgggcagctgggagacccagcggggctgaggagagcacgggggtccgtgcccgggcaccccttcctttcttcggccagatgctgcgcccacaccccggcctctgatgaagctctctgctggggatgtgctgccatcttgtggccattggtggaatacacccagtgggttggagcttgcagtcgccaccatctgcaaggagcgctcataagtgtgtgcactgcctctgggcgttgtggtacagagatggaggaagcccaggcccagcctctaggaattcacagcctagaggagaggcagatcaattcagtgtctgcaaaacccctcgcaccccccctattttatccccagagccacttctgtttgaaccacttctgtttcctctctaacctgagatgcacacgttaggatttggaattacaatttttaaagctcagcataggtaatatgcctctatttctacgaaatattctatggctccctattgcctacagaataaaggctgagctcctctggagttagggttgctggaataaaataaatgcacacccagtggcatgtctggtaccagcagacactgggtgggcggggcctgctagaggccaagtcagtggtcttctgctaaaaagtatggttcatccccctcccccaggggacttccttaaagcgagtccttaccgggctcaggttttctgtctgggagtccgtgtaaaagaaaacccaatcataggaccaggtaacccattaactcatgaactccatcaacacagcatcctcctgacagaaccggacatgggcaggggccaggggctcagtcctccccctttataaagagatcgagtctcaatgcggggaagtgactcgcccagtgtcacatagggccttggaatgacaggagcaggctgaagcagcagcattgagtctggaggggacaggatcggggacagacagctttgatttgagaaatgtgaataggggcggaggcgtggagtccaggaccccagctgtcttgcagcagtggccagaggaagcaggagcagtcctcctgccctgctgggagggagtcagctgtcccacccccagcccccttttcatcccccgccccaggcatctccctgatcatgtggaacgctctctacacggctgagaaggtcatcattcgatggaccctgctcaccgaagcttgctatttcggggtccagttcttgggtgagtcctgaggtgggcagtgagggaggctgatgggccgcttcgcccctgacctgcctgctctagccacctgggtgtgtgggaagtgatgaaaacctgtctgtggggggctagggaggggatagagggataaggactcacctggctgtgtttacttgtgtgcctgcacacctgtgcacacatgcctaacacacgtgcctgtagcttcccaaatccacacacttgtatctatggccttgcacacacatgtacctgcggcccccccacacccactgcccactgtacccagcacgtgtgtaataacacgcattcaattttgcccacctgctgtgccccagttcctgccacatgggagacatcagagcagaaacatctgtggggttggcaggggcagggggcaggtcctgtgcttcccacctgggaggatcctgggctcagagcaaagtcagggagacggccacaccagcgctccgggctaggggggcagcgctgggacacatcccctcctctgaccctgtggccttgctggactctctcccacagtggtcactgccacgctagctgagacgggcctcatgtccctggggatcctgctgctcctggtcagccgcctcctttttgtcgtcatcagcatttactactattaccaagtcggccgaagacccaagaaggcctagttgcccgctgggcctggggccctgcccatgcctgggccagagtggcgctggggcctcggcttccctttggctcctggaaggcaggagggtcccctgccctgccccagtcctgccccagggaggcagggggtggggggccttcctttcctcctgggcaccccgtgtgctgtgatctcctgggctttcaggcttgacatgctggtctggggagagacagggcctctgctgccctgttcttcaccctcacagtgatacctcctttccttgggtctcttggcctccagaccccctcaatagacactgactaaagtcaagctggagtcatgagggtagtgggctaagtcgagggtccagcctcttctgccaggaagcccttcttgcttttgagagaggctgtgaccaccccccatccttctccctacactcccagccaacctagtgcccaagcagctaaacttggcttccttctaatcctggaaaaccctgtacccctcctcctcaatctggccctctccacatgcacaccctgaaaacacacacagacacacaacacacacacatacacacccctgaacacacacacagacacacatacacccatgatgtgagcaaacacacacacgtgcgccttcatagcccagccaagggcatgcaggcagggtgtgctgcctgagatggcacctccctttcagccattcttcaagaatgggccacacacagctagaagtcctctcccagctagaagtcctgtccccactctcctggcctgacaagatgagctctcctgggaccttgctctagggcactctgcctctaccctaggacactggaatgccctgggagccccctccctgcaaccagcctgagttcagccccacggacaaagggacacacagcccccaatggagaccattgtaagtggtggggctgggagaggaggaacagaaggaaagccatagcgctctcttgccccttggcatgtaccccaaggcctgatggccactgggctcagcctgtcccccactcctgcctgcttcccggtgagctgccccccacacgtgcagcccgggctgcctccagggtctggctgagtgggatcaggtggccctccaactcagcacaggaaataagtagaaacatttcagcaggccacctcccctcatcttccccgccctgtccagcgccctggcaaaggctgacaactggctgtcttggggccgaacagcccctgccctgcctctgagggcccaccagcctgtgctgcatacccaccgcccagcttctccctgagggcccaccagcctgtgctgcatacccaccacccagcttctccctgagggcccaccagcctgtgctgtacaccccgttagtccctgatcccaaccttctccctcctgccagcacaccgatgcacacaccggaagtggcgagcccaagccctggggacaggtgtagggagaaaagcagccccaggcctcagactcgcttcccatcctggcatagagtgggggatggctggagggtgtctataggtacagcccgctctggctgctgccaggtgggcccctgccaggggtcctcacccctgtccaccctgtgcctggctgtccctgcacccagatacagcaacatggcctgtacccagcagagtggtggcaccaccatggttacagcggatgccccgagactctgcttggtaaacgtggcagagcagaatgggaggctggaccctgaggaagggcccctctcctggcatctgtctcttgctacctaagcctgtgcctctccctaaagagctgcctccctgctgccgagccctggtctggccacgagccactactgcctcccacaggcaccactgcctcccgctgctgcccacaggtggtgccgccaatgggcagtgccctcaggccgaagcctcaatcccccatctgagccaggcctaatcctctaatagtgatggttggtttgtcctcccataactgcaggtggattccacctggggaatgaggctgcgtgtcgggcgtctgctggccctgagacatccagtcttccacactcaactgtgggatgggagggtggcgtggccttaccccatgaggctgtccaggctctggcacacagctgtgctcacaaaatactgggtggcttggttagagctaattgtagtggagcctgcaggtgagggtgagggagggggctgcaggtcaggtaagatctggaagacagacgtacagcttggagggcagggggactctaaggcaaggagatttacagttgggaaggaggcagtggcagaggggtgagggacaggggcccttaagtccagcgaggaaagctcggtgtgggcccgctctacgctccgtttggggtgacctggaacgcctcttctcccagctccctccagccatcagcagcctcttgtcaagcttctgcctcgccccagtctatccccaaccccaaatcaagaccacctttcttcacggtcactatttattctttgttcctttttctttttgtaagaaacattcacaaaaaccagtgcaaaaccatcagtgtgggcgtcctgttttatattacaaaacttcctctggatatatcatataaaaggggggtctcacaggagagaaacgtgataaattagctctgcaatctacggcaaggaacatagtttttaaaatagactttcaacatatgacccatgggggaaggaggagggggcttctggggagacggcgggtgctggggcctcggctggtttgggaaatcctgtccgggccccttaagcatggatagagacatagacaagggaggctgtggacaggcctgagcaccaaggccagaaattaacagggaccctggggaggggccctcacccccagcccataaagagctattccctttctctaagaggcagtagcttcagagcaggaaagtggctttcgatacaggcagggtttgtgatgagcggtgtagtcttcttgttccttgccctgttagtggggtccgaggaagtctctgttatgggctgttgtatttcggggtgaaaagaaacaaagaggtatccctgcccacccctcccccacaaccccagccaccaccagaacctgctgtgggttgtatctggaccaagccagctaaaccctgtttctccctgtgctctggagggaggctcaagcctgatttgggctgagctttctttgccttgcctccaaggaatggcctcaggcagtcttgcaaatagctaccagcctgagcgaatgccaacaggagcagaaactgcctgtcttccctttccagcctaagagggtggccagtggctggctggcgagctgaatcagggctgattgagggttccttggcacatttgtagaaagctgctgaggggcagtcttgtgtctgcccttgaacccaccttagccagatttcccttcatgaccagccctttctcttgggtcctccctctgacttctgtgggccccagaagcctgggatgcccctggattagagccataaagctgtgcaatttgcctcagtcctgcccagcatgggttttttgttttttgtttttgtttttgtgtgtcatcctcagaccagccatttgcctcttccaaaaagctggggctaagcatgtgggtggttcaagaggggcagcccccaggccccaggctgggccgcggtaccagtggcaggtccccctgggtctcaggagcttagcttctacggagctcaggtgtcatttatggggttgccagagcaagctgttaaagggcgaatttggtaagactgagctcagagacctggtgggagggcaaggactggcgggcacagcaggaggagattagaggagggtccacctgaatctttgcagcaggcacagagcttctggctgcatctcagaagggggcagacgcacaggccagggaacacggggctctaggctgtggctccgagtgtccctggtgactggaaagcctgaggggaggctggaagctgatacaggatgccggtggcttgtgagacagaatgagctctttcttcctgaagagggacagaggggagagaagagagcagacatcacactgctccttccatccctgcccgtggcagacatcactaatcaaacttacggtgcctggcagacatcactcatcaggattgcactgccgtctcccactgagcccagaccaaacctcagatccccagcacagcctccagcagccacccctgatctatcagggtaggagcatcttgcaatccagttgccaacactcgtctagagtttgagaactgaatacttgtgggtgtgcatctgcgagtctccctgcccaagcctggagggaatactaagaaatgtgcggacagtgaagagacaggaaaccttgttgcagcagaaatggcctcgatgccttcgggattctttagcctggagagaagagggctcaggggagtcaatgtgtgacctcaacactccaggaaggagagtgggcaagtgggatgccatggacagagccacagaaaaacagaaacctcttctgtgtattaagctgatgctaaagtcagagcagtccaaaggcaggaggctgccttgggaggtagtaagctctctgtccctggaggtatgcaagagggtggagaagtcttggcaaggatgttgaagaagatatccaagcctcagttctgggtgtggagagggagacccagatgatcttggggatttcttccactcttggagctggggagttggggaaggacagggaagggggtggcatgtgggagaggcgggcagtgtggacaagggaatgtgatgtgcacctctgtgtgttcctggggactgagagagaggtgtggggaggtaggagcgagggcgcggtgggaagtcatggaatggtgttttcttagctgtagagcagggaggaggcagttcctggctgacttgccctctcttgtctgggggaaccgggatgctgaggccaggggtgcatgtgggcagcagagctgacagagtcctggatgcagtgacagcagcctggagacaactcagcttcttttcagaactgtcacgcctgtgctgtgtgtctgtggatggtcactgtcctctctgggcctttgagattatttggtccaacagatggggaaagcaaggatcctaccagctgggccattcttggatgccgtgttagcagctcactcttggccccggcctgaaggggggaacagtccatcctccagtggaccagggattgcgctgtgggttccgagtcctcaaagacatggcagctgaatctccgtgcagcccctgggctttgatgacttctctgagatttgcttttgcctccttgttgcctaaatcctcactttcttggcatcaggtcctggtgcagtgaggagagagggcccagggtctggctggaccaaagagggcgctgggcctggtgttcctttggtctctagagcagcctgcatcctgggccaggtgctggggtctctggagaacccacggcacctgccctgagtccaggcgaggatacatcagtccatatttttgtcttcattttgttttgttaaaaaaatagctctattcccctggcccttctcctggccatctctgatggcctcatcttctcccctggggccaagaggacagcggggaggggcacgggaggacattgggtgctgggcagtggtgggtggggcgagtcttcaggcttcaggccataccctctactggatgccccggaagaggcacatggcaaagatcatggcgaaaagctgcaaaaaaagaaaaagagcaggaactggcttatcaggctgggccctttgtgggctgcctggcccactccaggggaaggggagtgaatgcctgtcactcttagcacactcctcccctaaggattcctgacattcccctggggccagcccttctcaccagcccctacctggcttcctttatgtggtggagtcatggaccaggaagactttagaaacgagtgttgggttcaaatccagctccctgacatagcagggttgtccttaggcaaagcacttccctacactgggcctgagtatgtatccagagcttgccatgtgccaggcacagttttttttttcttttttgagacagagtctcactctgttgcccaggctggagtgcagtggcacgatctcagctcactgcaacctctgcctcccaggttcaagcaattctcctgcctcagcctcctgagtagctgggactacaggcatgcgtcaccacgcccagctgatttttatatttttagtagagacagggtttcaccatgttggccaggatggtctccatctcttgacctcgtgatctgcctgcctcggcctcccaaagtgctaggatttacaggcgtgagccacagcgcccagccaaggaacagttttaagtgctttattgggaggtatgtaacctacctgaggtcacagagccaccagcaggggagcttgggtttcagtcccaggcattgtgaccccagagcccatgcttacaacccctgcaggctcgcctccagctcacaggaaggtggtgagatttaagtgtaatgcaattacctaatgatgtaatgtgcctcttatctagaagttgctcagtaaaaggttaccaggactgctatgaataggcaggcagctgcagcccttcccggagttatgagctccatccctgaacacctgtctgagggcctggggtggtggggcagggagaccctagctcagggactctgaccagatttgctgatgttctcacggccagagctcattgcaagtagctgagggaacagtccctagaccacaggtcatggccaaatcaccaggaggctcactggggtggggaggggctaccgggacggggccatgtaaaggtctccgtcttgagcaggattctgcctcccatggggctggccagccaggctcatgggctgggctgggagtgaggcagcagatcaagtatatgaatgctgcttcctgagccccagtagcatgctgtccccgtcatctgtaatccctctgtgccctgggagcagggtgatcagcccattttgcagatgaagaaactgtgacttagacatcctgcatttggagagaggcagagctgggagccggactctagggcccatgctattccttcatgggacacgtccctgagatttccctgggcttgctgcggatttatcttgttcattgttgcccgccatgaggggacttgttcaactataacagtgctggcgaagaatagggctcagtgtgtgcttgttgaatacatgaatgaataatcaatgacccctccctctccgccatctgcagtagcctccacgaaactgcactccgtggcgctgcaggcacagtgggaaaccaggcaaggcgaagttcatggtgccaggtgcccaggctgctggagggggaagctgaggattgggctgcctgacttccttcccccgcaggccgaggactgactgaggccccagagtgccccttcctgggtttggtcagatgtgggcaacgctctgtccagcccccaggagcagcaagtcggagatcccagatgatggagatcccagaggacagaaacgggaggcggccgctcctccctttggctgaggcgccacctagtggtgattgcaaacggtctgcaggagcttacctttcaaggggactctggggccctcagataaaggaggctaaggccaccgttgtggatgaataaggccctgtaggccctgaacaccccacagagaaaaggcctgatctcaaaccacgggctgcagcctgtccttcaaggcagccgtgctgatgcctctgcaagcgtgaaatctctctggaccatggagctggggcggaggtggggatgaggatggaagagtgagagggagtggggatgacactcagggcctgcccatccccatttctgggacactggctcccatgtttcatctccagagttcaagaatgactctcaggcagcacagacacagccgggcttaccaccccatagcacccacagtgggggccccttgggtcccaggtgaaggaaatgaagaggaaaggaggctggggggatctgcctaggctccacgtgaggcttcatcctggggagcggcagaagtgggggcctttacttacctcgatggccagtaccccgatggcaagggctccggccaagtagacgtaggtctcgaaggtgttgaggatcaccgtgtaacagccctgggagggagggatgagaggtcaagctatggccagggttgagagtcctggagtcagagtccagcatgtggactagggttcatggcaggtgtccccagagctctcaccctatcacacggctgctgagacaggacagtggggagggggtgcagggcaggagacccagaaacagcgacttggcagcattgcaccaaagaccctctttgccacccggcccctaaggtgggacagagaactgacagcgtgcaggccatgtctaatgttgcaactacagtgattggaatattgggaaatttcccataaatatttggacttcctgctgctctggagaaatcagaagaaccagcaaggggagctattccttttcacatcagcagctgctgccttcgggtgccaacaggtggtccctggggatccacagcactccacccctctcccccgcacaattccctattgtttcacacccactcgctctactgttcctcgtgacctgcctggctgcagaaggtgttttggttttcggccacttccccaaggaaacacagcccagccttcaaatccctgctcgcatgccacctccttcgggcagctttctgaaccagcccagtccacaggccctggacttaattcccatgatcttactgctttcttaagcaatcctagagatacataaactgagacagagacagagatcgagatcgagatcgagatagatagatagagataggaaaaagcaagctagtgccaagccaggagctgccagtccatggctgctgccccctctgaccccaagcacctcacacctctgtcattttcatgttcataactctcccctcccccatgctgaccacagagactgatgcatggtacttgctttgaatgacacgtattttcaaagtgggagaactttccttcctttataggagcctgcatattctttgggcccaggctgagaacctgcaagggaacaaatccccagatgggggtggagagatcatgcccagccctttttgggtgacggttgctatttctgggctctgttgagaccggggattcttgggtgctgacatgctcacttctcttgtccatcgtgcagaagcccagcccctttggccaaaagtaggactgaggctgcacccaggcaggtggacagcagggcctgatctgggactagtggccaggtggtgtcctagtacctgcctggaggctgaccaggagctgggcagggaagtcccccagaagccctccctggagccccatggagcaaacaggacatacccagatagaaacagaccccaccggcacgacgatctgggtccatgatactctcaggactgagtgtgcatgggaataatcggggaagtggttggcaatgcagatgccaagacctcgccccacaacactggatcagtgggtctggtgtggagcccaggtatcagcattataggacgatacccaaggtaatttctagtgatcaggctgtggccaggctttgaaagacctcaagcccagagatgacaaggagaaaaggtcttaattgaaccttcaggccttgtctctgctgtggcactgggagcccagttaagggctgtatgactgggatggagccctaagggcaacccaggggttcctaccccaggccaggccaggccaggacatcagtgtggctgggggtccgttcagggctggccctccattcagtgaggcccagggtccatcctggatctgccagcagacccatgttggagccccaaatcctttgttaagcgagttttttaaaaattatactttaagttctagggtacatgtgcacaacgtgcaggtttgttacatatgtatccatgtgccatgttggtgtgctgcacccattaactcgtcatttacattaggtatatctcctaatgctatccctcccccctcccatgtgaagcgattttgaagcattagaaccctaaaatgcagaactataacagcagaaaaactaacctgctctgcgagcaaggaaagagaggtgagttgtatagttttgggatcagccctggcaggggatgcctcggccctcccatcatcccctcagtgttccacgtgcctgccagccacagggacataatcccacctcctgcagccccaacacacacactgggtttgtgaactctttgaggggtttcccggacagggaacagcaatggcccaggagagtggtatctggcaatggtccttagggcctggttgcctagggtcccagccagcgctgccactggcttgctgtgcgaccttgggctatttacttcctctccctatgcctcagttgccccatctgtacaatggggccatgtagattacctcatgggattgctgtgaggataaaatgagatactgaaggtaaggcactaggaagagtgttggcaagtagcaagctctcaatctcaatgcctgttaggattaccaaggattaccgtccgtctctctgtgccgctctcttagcatatcctgagtggtggaaagtgtctgagcatagagttgggtgtcactgcaatataatcacacacacacacacacacacacacacacacaaccccacacaaccccagtaaggggacaggagaagcagcacatctcttccagagcatgaaattgactttgacatgcctcacccggggaaactggcaagaagccggggaccttgtccagcagagggaagctgagccctgctgtgtggcacctgggccttgacagctcatcttcccctatcaggctttggcaccaaagacccttcaggcccctggactcaaccaagcagcccaggttgcccaatggaagcttcccaggaacagagacacccctggggaggttggggcatggacaggatgccaccacccactctgaatgagtgtctgctctcttgataactttgctagggcctcgtgggctctttctcacttgatctcattacagccctcggggaggaggggtcttacctgcattttacccacaagaaaagggagggaggagcagtggctaacttgtttaagatcacacacgaggaagggaagccaggatttacactgaggattccaaattcccggtctttcctctgtgcttaagggaaagggggctggcatgagcggctgggttctccctcctatgggccaggccctggctgtagcccagagcttacatctacacacctggagattgcttcaccaccacccaccatctccaccccgtgacggtttcccctgtcaccacccggtgagacacatggcggggagcctctccccagcctgccaccacagactatgagtcttctaaccatgtgggctgttgccagtgccatcctccctctctgctgggtgggcacatcccccaccccctgctgccacccacagtcaccacccacctaatctgatgaggggcagccaggcctggttgccaccacaatgggtcacccacacgcaatgcttcccacacgtacatctccagcaccgacccctccagctccaccccatacacccagctgcccactggacacctctgctcagctgttccaaaggcttctttttttcttttttttgagatggagtctcactgtgctgcccaggctgaagcacagtggcatgacctcagctcaccgcaacctccgcctcccgggttcaagtgattctcctgcctcagcctcccaagtagctgggattataggcacatgccaccacgccaggctaatttttgtatttttagtagagacggggtttctccgtgttggctgggctggtctcgaactcctgacatcaggtgatccgcccgcctcggcctcccaaagtgttgggattacaggcgtgagccaacgtgcctggcctccaaaggtttcttagacgcaacatgccccagactgaatgcaagatcgtccccaaaccagaagccagtcactcagcacctcctcctgcccctcctccaatgaggacccatcacgaaggctggtagattttgcctcctgaacatttctcagatccacacacctctctgtctttaccgccatcaccctggtcttacctgctgtcctttctcactggcaccagtataaaagccccctgtctacccaggtccaccaccaatgtggaccagggggccacagagcaactaggatgtccctgtggccacgccatgcatccctgcacacctcacccccaccccaacccccacagtgaactcaactcttcccagatccttgccatgggcctgccagcaaagtcagaaatgtatcctagggccggacatggtggttcatgcctgtaatcccagcacttggggaggccaagagggtggatcatttgaggtcaggagtttgagaccagcctggacaacatggtgaaatgccggtctctaccaaaaaatacaaaaattagctgggtatggtggcatgtgcctgtagtcccagctacttgagaggttgaggtgggagaaacacttgaaccctggaggtggaggttgcagtgagccaggattgtgccattgcactccagcctgagcgacagagcgagactcagtctcaaaaaaaaaaaaaaaatgcatcctgggctttaagcaagagggctttggaggaaaagacaaatagagacagttccacagcagcagatttttaacgggacgaaatgcctaggagggacatgaatgtctcagcaaagaaaccccaggagccagtctcagaccctcaggaacaacagagtcactggaaagaatgaatgtggctgtgcagggacctctctgatgagctctgattttgaagacatgcccaggagaggaaaggagacatcctaacggaggatgagtccagaaatgggaagcacatctgatgcggggaatgcggcccatgggaagcctcctgaaaacttacaagtagcattaaaaggttctaagtttggctgttggcaacgggcatctcaaacaacagctccttcaccaagttacaaattcactggtctttcacataaaccccacgctatggtggccgctgtatgccatggaactgtacgtggcccaggctccttctctctggatgctctgccatcctaggggcca

SEQ ID NO: 41 - DNA, 4099 bp, Homo sapiens
cccccagtctttgcccccgcagggccgcggacggaggtggtggcggagttcccgctgcccacaagtctggcccgaccttctggggtgggggcctgggggcaggggccctgggccggagaacccggggccgcctaacggctcggagctcaccgccgggggacaccggcgctgaggcctgggtctcagaaagtggcccttctgcagaggccgggctggaggagaagatggcggccaagcagcccccgcctctgatgaagaagcacagccagacggacctcgtgagccgcctgaagacccgcaagatcctcggcgtgggcggggaggatgacgacggggaggtgcatcgctccaagatcagccaggtcttaggcaatgaaatcaagtttaccattcgggagcctttggggctcagggtctggcagttcgtctctgctgtgctcttctccggcattgccatcatggcgcttgccttccctgaccagctctatgatgcggtctttgatggagcccaggtgaccagcaagacccccatccgcctctacggcggtgccctcctcagcatctccctgatcatgtggaacgctctctacacggctgagaaggtcatcattcgatggaccctgctcaccgaagcttgctatttcggggtccagttcttggtggtcactgccacgctagctgagacgggcctcatgtccctggggatcctgctgctcctggtcagccgcctcctttttgtcgtcatcagcatttactactattaccaagtcggccgaagacccaagaaggcctagttgcccgctgggcctggggccctgcccatgcctgggccagagtggcgctggggcctcggcttccctttggctcctggaaggcaggagggtcccctgccctgccccagtcctgccccagggaggcagggggtggggggccttcctttcctcctgggcaccccgtgtgctgtgatctcctgggctttcaggcttgacatgctggtctggggagagacagggcctctgctgccctgttcttcaccctcacagtgatacctcctttccttgggtctcttggcctccagaccccctcaatagacactgactaaagtcaagctggagtcatgagggtagtgggctaagtcgagggtccagcctcttctgccaggaagcccttcttgcttttgagagaggctgtgaccaccccccatccttctccctacactcccagccaacctagtgcccaagcagctaaacttggcttccttctaatcctggaaaaccctgtacccctcctcctcaatctggccctctccacatgcacaccctgaaaacacacacagacacacaacacacacacatacacacccctgaacacacacacagacacacatacacccatgatgtgagcaaacacacacacgtgcgccttcatagcccagccaagggcatgcaggcagggtgtgctgcctgagatggcacctccctttcagccattcttcaagaatgggccacacacagctagaagtcctctcccagctagaagtcctgtccccactctcctggcctgacaagatgagctctcctgggaccttgctctagggcactctgcctctaccctaggacactggaatgccctgggagccccctccctgcaaccagcctgagttcagccccacggacaaagggacacacagcccccaatggagaccattgtaagtggtggggctgggagaggaggaacagaaggaaagccatagcgctctcttgccccttggcatgtaccccaaggcctgatggccactgggctcagcctgtcccccactcctgcctgcttcccggtgagctgccccccacacgtgcagcccgggctgcctccagggtctggctgagtgggatcaggtggccctccaactcagcacaggaaataagtagaaacatttcagcaggccacctcccctcatcttccccgccctgtccagcgccctggcaaaggctgacaactggctgtcttggggccgaacagcccctgccctgcctctgagggcccaccagcctgtgctgcatacccaccgcccagcttctccctgagggcccaccagcctgtgctgcatacccaccacccagcttctccctgagggcccaccagcctgtgctgtacaccccgttagtccctgatcccaaccttctccctcctgccagcacaccgatgcacacaccggaagtggcgagcccaagccctggggacaggtgtagggagaaaagcagccccaggcctcagactcgcttcccatcctggcatagagtgggggatggctggagggtgtctataggtacagcccgctctggctgctgccaggtgggcccctgccaggggtcctcacccctgtccaccctgtgcctggctgtccctgcacccagatacagcaacatggcctgtacccagcagagtggtggcaccaccatggttacagcggatgccccgagactctgcttggtaaacgtggcagagcagaatgggaggctggaccctgaggaagggcccctctcctggcatctgtctcttgctacctaagcctgtgcctctccctaaagagctgcctccctgctgccgagccctggtctggccacgagccactactgcctcccacaggcaccactgcctcccgctgctgcccacaggtggtgccgccaatgggcagtgccctcaggccgaagcctcaatcccccatctgagccaggcctaatcctctaatagtgatggttggtttgtcctcccataactgcaggtggattccacctggggaatgaggctgcgtgtcgggcgtctgctggccctgagacatccagtcttccacactcaactgtgggatgggagggtggcgtggccttaccccatgaggctgtccaggctctggcacacagctgtgctcacaaaatactgggtggcttggttagagctaattgtagtggagcctgcaggtgagggtgagggagggggctgcaggtcaggtaagatctggaagacagacgtacagcttggagggcagggggactctaaggcaaggagatttacagttgggaaggaggcagtggcagaggggtgagggacaggggcccttaagtccagcgaggaaagctcggtgtgggcccgctctacgctccgtttggggtgacctggaacgcctcttctcccagctccctccagccatcagcagcctcttgtcaagcttctgcctcgccccagtctatccccaaccccaaatcaagaccacctttcttcacggtcactatttattctttgttcctttttctttttgtaagaaacattcacaaaaaccagtgcaaaaccatcagtgtgggcgtcctgttttatattacaaaacttcctctggatatatcatataaaaggggggtctcacaggagagaaacgtgataaattagctctgcaatctacggcaaggaacatagtttttaaaatagactttcaacatatgacccatgggggaaggaggagggggcttctggggagacggcgggtgctggggcctcggctggtttgggaaatcctgtccgggccccttaagcatggatagagacatagacaagggaggctgtggacaggcctgagcaccaaggccagaaattaacagggaccctggggaggggccctcacccccagcccataaagagctattccctttctctaagaggcagtagcttcagagcaggaaagtggctttcgatacaggcagggtttgtgatgagcggtgtagtcttcttgttccttgccctgttagtggggtccgaggaagtctctgttatgggctgttgtatttcggggtgaaaagaaacaaagaggtatccctgcccacccctcccccacaaccccagccaccaccagaacctgctgtgggttgtatctggaccaagccagctaaaccctgtttctccctgtgctctggagggaggctcaagcctgatttgggctgagctttctttgccttgcctccaaggaatggcctcaggcagtcttgcaaatagctaccagcctgagcgaatgccaacaggagcagaaactgcctgtcttccctttccagcctaa

SEQ ID NO: 42 - protein, 187 aa, Homo sapiens
MAAKQPPPLMKKHSQTDLVSRLKTRKILGVGGEDDDGEVHRSKISQVLGNEIKFTIREPLGLRVWQFVSAVLFSGIAIMAFPDQLYDAVFDGAQVTSKTPIRLYGGALLSISLIMWNALYTAEKVIIRWTLLTEACYFGVQFLVVTATLAETGLMSLGILLLLVSRLLFVVISIYYYYQVGRRPKKA

SEQ ID NO: 43 - DNA, 4079 bp, Homo sapiens
ccccgggagagcttcgcgggggagccgtgagcctggtttccccgccaacccccattcccgccgccccggcggccaccctgggggcgaggcagcccggcgcgtgggaggggacggcgcgccattggcttgtgcgcggaaccgagaggagggaccagcgcgggccgccagactcgcccttctgcagaggccgggctggaggagaagatggcggccaagcagcccccgcctctgatgaagaagcacagccagacggacctcgtgagccgcctgaagacccgcaagatcctcggcgtgggcggggaggatgacgacggggaggtgcatcgctccaagatcagccaggtcttaggcaatgaaatcaagtttaccattcgggagcctttggggctcagggtctggcagttcgtctctgctgtgctcttctccggcattgccatcatggcgcttgccttccctgaccagctctatgatgcggtctttgatggagcccaggtgaccagcaagacccccatccgcctctacggcggtgccctcctcagcatctccctgatcatgtggaacgctctctacacggctgagaaggtcatcattcgatggaccctgctcaccgaagcttgctatttcggggtccagttcttggtggtcactgccacgctagctgagacgggcctcatgtccctggggatcctgctgctcctggtcagccgcctcctttttgtcgtcatcagcatttactactattaccaagtcggccgaagacccaagaaggcctagttgcccgctgggcctggggccctgcccatgcctgggccagagtggcgctggggcctcggcttccctttggctcctggaaggcaggagggtcccctgccctgccccagtcctgccccagggaggcagggggtggggggccttcctttcctcctgggcaccccgtgtgctgtgatctcctgggctttcaggcttgacatgctggtctggggagagacagggcctctgctgccctgttcttcaccctcacagtgatacctcctttccttgggtctcttggcctccagaccccctcaatagacactgactaaagtcaagctggagtcatgagggtagtgggctaagtcgagggtccagcctcttctgccaggaagcccttcttgcttttgagagaggctgtgaccaccccccatccttctccctacactcccagccaacctagtgcccaagcagctaaacttggcttccttctaatcctggaaaaccctgtacccctcctcctcaatctggccctctccacatgcacaccctgaaaacacacacagacacacaacacacacacatacacacccctgaacacacacacagacacacatacacccatgatgtgagcaaacacacacacgtgcgccttcatagcccagccaagggcatgcaggcagggtgtgctgcctgagatggcacctccctttcagccattcttcaagaatgggccacacacagctagaagtcctctcccagctagaagtcctgtccccactctcctggcctgacaagatgagctctcctgggaccttgctctagggcactctgcctctaccctaggacactggaatgccctgggagccccctccctgcaaccagcctgagttcagccccacggacaaagggacacacagcccccaatggagaccattgtaagtggtggggctgggagaggaggaacagaaggaaagccatagcgctctcttgccccttggcatgtaccccaaggcctgatggccactgggctcagcctgtcccccactcctgcctgcttcccggtgagctgccccccacacgtgcagcccgggctgcctccagggtctggctgagtgggatcaggtggccctccaactcagcacaggaaataagtagaaacatttcagcaggccacctcccctcatcttccccgccctgtccagcgccctggcaaaggctgacaactggctgtcttggggccgaacagcccctgccctgcctctgagggcccaccagcctgtgctgcatacccaccgcccagcttctccctgagggcccaccagcctgtgctgcatacccaccacccagcttctccctgagggcccaccagcctgtgctgtacaccccgttagtccctgatcccaaccttctccctcctgccagcacaccgatgcacacaccggaagtggcgagcccaagccctggggacaggtgtagggagaaaagcagccccaggcctcagactcgcttcccatcctggcatagagtgggggatggctggagggtgtctataggtacagcccgctctggctgctgccaggtgggcccctgccaggggtcctcacccctgtccaccctgtgcctggctgtccctgcacccagatacagcaacatggcctgtacccagcagagtggtggcaccaccatggttacagcggatgccccgagactctgcttggtaaacgtggcagagcagaatgggaggctggaccctgaggaagggcccctctcctggcatctgtctcttgctacctaagcctgtgcctctccctaaagagctgcctccctgctgccgagccctggtctggccacgagccactactgcctcccacaggcaccactgcctcccgctgctgcccacaggtggtgccgccaatgggcagtgccctcaggccgaagcctcaatcccccatctgagccaggcctaatcctctaatagtgatggttggtttgtcctcccataactgcaggtggattccacctggggaatgaggctgcgtgtcgggcgtctgctggccctgagacatccagtcttccacactcaactgtgggatgggagggtggcgtggccttaccccatgaggctgtccaggctctggcacacagctgtgctcacaaaatactgggtggcttggttagagctaattgtagtggagcctgcaggtgagggtgagggagggggctgcaggtcaggtaagatctggaagacagacgtacagcttggagggcagggggactctaaggcaaggagatttacagttgggaaggaggcagtggcagaggggtgagggacaggggcccttaagtccagcgaggaaagctcggtgtgggcccgctctacgctccgtttggggtgacctggaacgcctcttctcccagctccctccagccatcagcagcctcttgtcaagcttctgcctcgccccagtctatccccaaccccaaatcaagaccacctttcttcacggtcactatttattctttgttcctttttctttttgtaagaaacattcacaaaaaccagtgcaaaaccatcagtgtgggcgtcctgttttatattacaaaacttcctctggatatatcatataaaaggggggtctcacaggagagaaacgtgataaattagctctgcaatctacggcaaggaacatagtttttaaaatagactttcaacatatgacccatgggggaaggaggagggggcttctggggagacggcgggtgctggggcctcggctggtttgggaaatcctgtccgggccccttaagcatggatagagacatagacaagggaggctgtggacaggcctgagcaccaaggccagaaattaacagggaccctggggaggggccctcacccccagcccataaagagctattccctttctctaagaggcagtagcttcagagcaggaaagtggctttcgatacaggcagggtttgtgatgagcggtgtagtcttcttgttccttgccctgttagtggggtccgaggaagtctctgttatgggctgttgtatttcggggtgaaaagaaacaaagaggtatccctgcccacccctcccccacaaccccagccaccaccagaacctgctgtgggttgtatctggaccaagccagctaaaccctgtttctccctgtgctctggagggaggctcaagcctgatttgggctgagctttctttgccttgcctccaaggaatggcctcaggcagtcttgcaaatagctaccagcctgagcgaatgccaacaggagcagaaactgcctgtcttccctttccagcctaa

SEQ ID NO: 44 - protein, 187 aa, Homo sapiens; identical to SEQ ID NO: 42

SEQ ID NO: 45 - DNA, 4105 bp, Homo sapiens
gtaagccccggccgcgcaggcgccgcgcgcagtccagccggcccggccctgccctgccctgccctgtcctgccctgccctgccctgccctgccctgcactgcccggcccggcacgggcggcgcgatgtgaggcgtccgagcccggagcctccgcctggcatcagctccacgtagcccagcgccggcacgcgcgaggccccccttctgcagaggccgggctggaggagaagatggcggccaagcagcccccgcctctgatgaagaagcacagccagacggacctcgtgagccgcctgaagacccgcaagatcctcggcgtgggcggggaggatgacgacggggaggtgcatcgctccaagatcagccaggtcttaggcaatgaaatcaagtttaccattcgggagcctttggggctcagggtctggcagttcgtctctgctgtgctcttctccggcattgccatcatggcgcttgccttccctgaccagctctatgatgcggtctttgatggagcccaggtgaccagcaagacccccatccgcctctacggcggtgccctcctcagcatctccctgatcatgtggaacgctctctacacggctgagaaggtcatcattcgatggaccctgctcaccgaagcttgctatttcggggtccagttcttggtggtcactgccacgctagctgagacgggcctcatgtccctggggatcctgctgctcctggtcagccgcctcctttttgtcgtcatcagcatttactactattaccaagtcggccgaagacccaagaaggcctagttgcccgctgggcctggggccctgcccatgcctgggccagagtggcgctggggcctcggcttccctttggctcctggaaggcaggagggtcccctgccctgccccagtcctgccccagggaggcagggggtggggggccttcctttcctcctgggcaccccgtgtgctgtgatctcctgggctttcaggcttgacatgctggtctggggagagacagggcctctgctgccctgttcttcaccctcacagtgatacctcctttccttgggtctcttggcctccagaccccctcaatagacactgactaaagtcaagctggagtcatgagggtagtgggctaagtcgagggtccagcctcttctgccaggaagcccttcttgcttttgagagaggctgtgaccaccccccatccttctccctacactcccagccaacctagtgcccaagcagctaaacttggcttccttctaatcctggaaaaccctgtacccctcctcctcaatctggccctctccacatgcacaccctgaaaacacacacagacacacaacacacacacatacacacccctgaacacacacacagacacacatacacccatgatgtgagcaaacacacacacgtgcgccttcatagcccagccaagggcatgcaggcagggtgtgctgcctgagatggcacctccctttcagccattcttcaagaatgggccacacacagctagaagtcctctcccagctagaagtcctgtccccactctcctggcctgacaagatgagctctcctgggaccttgctctagggcactctgcctctaccctaggacactggaatgccctgggagccccctccctgcaaccagcctgagttcagccccacggacaaagggacacacagcccccaatggagaccattgtaagtggtggggctgggagaggaggaacagaaggaaagccatagcgctctcttgccccttggcatgtaccccaaggcctgatggccactgggctcagcctgtcccccactcctgcctgcttcccggtgagctgccccccacacgtgcagcccgggctgcctccagggtctggctgagtgggatcaggtggccctccaactcagcacaggaaataagtagaaacatttcagcaggccacctcccctcatcttccccgccctgtccagcgccctggcaaaggctgacaactggctgtcttggggccgaacagcccctgccctgcctctgagggcccaccagcctgtgctgcatacccaccgcccagcttctccctgagggcccaccagcctgtgctgcatacccaccacccagcttctccctgagggcccaccagcctgtgctgtacaccccgttagtccctgatcccaaccttctccctcctgccagcacaccgatgcacacaccggaagtggcgagcccaagccctggggacaggtgtagggagaaaagcagccccaggcctcagactcgcttcccatcctggcatagagtgggggatggctggagggtgtctataggtacagcccgctctggctgctgccaggtgggcccctgccaggggtcctcacccctgtccaccctgtgcctggctgtccctgcacccagatacagcaacatggcctgtacccagcagagtggtggcaccaccatggttacagcggatgccccgagactctgcttggtaaacgtggcagagcagaatgggaggctggaccctgaggaagggcccctctcctggcatctgtctcttgctacctaagcctgtgcctctccctaaagagctgcctccctgctgccgagccctggtctggccacgagccactactgcctcccacaggcaccactgcctcccgctgctgcccacaggtggtgccgccaatgggcagtgccctcaggccgaagcctcaatcccccatctgagccaggcctaatcctctaatagtgatggttggtttgtcctcccataactgcaggtggattccacctggggaatgaggctgcgtgtcgggcgtctgctggccctgagacatccagtcttccacactcaactgtgggatgggagggtggcgtggccttaccccatgaggctgtccaggctctggcacacagctgtgctcacaaaatactgggtggcttggttagagctaattgtagtggagcctgcaggtgagggtgagggagggggctgcaggtcaggtaagatctggaagacagacgtacagcttggagggcagggggactctaaggcaaggagatttacagttgggaaggaggcagtggcagaggggtgagggacaggggcccttaagtccagcgaggaaagctcggtgtgggcccgctctacgctccgtttggggtgacctggaacgcctcttctcccagctccctccagccatcagcagcctcttgtcaagcttctgcctcgccccagtctatccccaaccccaaatcaagaccacctttcttcacggtcactatttattctttgttcctttttctttttgtaagaaacattcacaaaaaccagtgcaaaaccatcagtgtgggcgtcctgttttatattacaaaacttcctctggatatatcatataaaaggggggtctcacaggagagaaacgtgataaattagctctgcaatctacggcaaggaacatagtttttaaaatagactttcaacatatgacccatgggggaaggaggagggggcttctggggagacggcgggtgctggggcctcggctggtttgggaaatcctgtccgggccccttaagcatggatagagacatagacaagggaggctgtggacaggcctgagcaccaaggccagaaattaacagggaccctggggaggggccctcacccccagcccataaagagctattccctttctctaagaggcagtagcttcagagcaggaaagtggctttcgatacaggcagggtttgtgatgagcggtgtagtcttcttgttccttgccctgttagtggggtccgaggaagtctctgttatgggctgttgtatttcggggtgaaaagaaacaaagaggtatccctgcccacccctcccccacaaccccagccaccaccagaacctgctgtgggttgtatctggaccaagccagctaaaccctgtttctccctgtgctctggagggaggctcaagcctgatttgggctgagctttctttgccttgcctccaaggaatggcctcaggcagtcttgcaaatagctaccagcctgagcgaatgccaacaggagcagaaactgcctgtcttccctttccagcctaa

SEQ ID NO: 46 - protein, 187 aa, Homo sapiens; identical to SEQ ID NO: 42

SEQ ID NO: 47 - DNA, 56773 bp, Mus musculus
  misc_feature (1)...(56773): n = A,T,C or G
cagatctcatgaaactggaggtatgcatggctgtgagccaccatgtgggtgctgagaattgatcccaggtcctctggagaagcagtcagtgcttataaccactgaaccatctctccagtgccaacattaagttacttttaattttttaattaaaaattattgtgtggccttgcagtggtggcacacgtctttaatcccagcattcgggaggcagaggcaggaggatttctgagttcgaggccagcctggtctacaaagtgagttccaggacagtcagggctacacagagaaaccctgtctcgaaaaaccaggaaaacaaaacaaaaaacaagcaaacaaaaaattattgtgtgatctggcagtggtggtgcaggtctttaatcccagcattcgggaggcagagacaggcagatctatgggtttgaaaccagcctggtctacaggtgggttctaggacagccagggctacacagagaaactgtctcaaaaaaaaaaaaaaaaaaaaagaaaaaaaaaaagaaaagaaaaagaaaagaaaagaaaagaaaaaaaagtgtgtgtccagaggcctacttgtctcctagtccatgtatgagacctgaggagagagcactagggagctggctttctccatccccttcacgtgggccctgggaattgaactcagttcttgggccatcaaatttgcaataagaggcttttatttcctcagccatctctttgacccttttaatcctaacaatttaaactgaaaacatgaattcacagataaggaactgactgtgtatatagatgcacagggctcctctgttgtcttgaaacagggtcatccccagttggccatctttctgcctcacttcccaaaggctgcgattactaatatgtgctaccatgtctggctcttttaaaaaaacatttcgatatgtgagccacgggaaataatgaaagtcttgtgaggtttaacgcatgaggagttgagggttctgtgggtgggatgtaggatcacgcgtgcatcttgaagagattactagcttctgcagagagcgggttaaaaggcctggcttagaagagaacattgtgatgtttccttgaaagtgtgcaagctaacgcaagcattcgcaagatgagtaaagctttcagggaggaagaggtctcgcagaagagagacactattgctctgtagttttgcctttttatgtgtccttgtaaaggggacagggtagagctggttcctaactactggagaaagggaagacacagtacctttcccctaaaaagtccttgggaaaattattgattactggggtaactgttaacctcctctcccaaagtgaacgcattcagctgtaacatagccccatggcagagcatttgtctggttcactctgttcaacctgtcccagcccaaagtatctatctctgtctatccatccttccatacactagactacagaaaactcaacttctaaattggcttatgcctggaatcccaccaccacttgggaagctgaggcaggtggactgctgagagttaaaaagtcaatcaaggttatagattaagactataaacaaaatgccgcatgaataaaaaaaaccaaatgaatatgaaagacaaaaccaaatctgatgttagtgtcatcgtcctggcacatggggacctaaggcaggaggataaatatctttgtttgtttgtgttttggtttttccagacagggtttctctgtgtagccttggccatcctagaactcactctgtaaaccaggctggcctcgaactcagaaattcacctgcctctgcctcccgtgtgctagggttaaaggcgtgcgccaccacacccggctgaggataaatatcttgaagcctgtctgagatatacagtaagatcctgactcttaaactcccttcatgcttggcttcataagtggatttgtgtccacgttcttcctaccaaggcagtttggtcacttcatattgctcaagaggcagaggctcctaactttgttttgttgtttttgttttttgagacagggcctcactctactgggactctctaggagaccaagctgtcctacaactgaaagaatcatctgcctgtggctcccaggtgcagggactgaagacccgactcaccacagctggcctaacttattttcttctaatactgcatgtcatcaggtggctctggcttcctggcattctctaggtagagcaggcttggattcacagagcgtctaatgcctctgcttctagggttccccgattaaagaagtgtactgaccacaccggctctatgctatttttatgagatggccatgaacttacagagatttgaggattaaaggtgtgggacgccactgcccagctctggtctcctctttgaggtttctttcctggagatttaatctcatcaaaaagacaccactattttttttttaaagatcttttgttaagatttattttaattttgtttatgtattaatgtgtctcacctgagtacaggcggcccattggctctcttggagctggaattgcaggcagctgtgaggcacccatgagggtactggggattgaagtcttgttttctggaagcgcagcaatacagagccaccactcctgcctcatgaagacttcttgatctcctgaccttggaatgtgctatattaattttggcacaaatgtccagaccatggtactcatttttctttttttgataactttccaatacaatcccttgcatgtttttattctattctgtttgtggttatttactgatgaattttgtgaacttcttcctacgtccagtttccaagtgctaggtttccatgcctgtgccaccactcctggcttaatagttgtggtttatttatctattttttgtttttttttttttgagacagggtttctctgtgtagcccaggctgtcctggaactcactctgtagaccaggctggcctcaaactcagaaatctgcctgcctctgcctcccaagtgctgggattaaaggcatgcgccaccactgcctggctaacaattgtgtttttaaaactgatttacaatgcttctttgtaaatcagtgaaccgacttttgtcatgtatatacaagatttctcttttcctgctgtttatgataaaaccacattttcctttagggggctgtgcagatagcttgttggtttttatggggcagagtgttttcctcttgtttggagacagccttggtaacctctactggccttgagagctttcagcaagtctcctgtctcagcctcccaggtgaggtggctcactggagctcacctggaaaaagtcaaatgtggtggtcagggtgtggtagggtatgttagggtgtgcttgcaattgctgagctgaggcaggcgaacccctggggcttactgctcagctagtttacccttctttgtgaattcctggccagtaaaacaaacaaaaacagctgggtgtggtggtgcctttaatcccagcacttcgggaggcagaggcaggtggatttctgagttcaaggccagcctggtctacagagtgagttccaggacagccagggctacacagagaaaccctgtcttgaaaaatccaaaaacaaacaaacaaacaaacacctcaaaacaaaaccagggccaccaagcccaagctcaatcatttgatgaaaagaacccactctcaacaggcccgacctccacacactccctgtggcacacacacacacacacacacacacacacacatattaaataaaaaataggatgtacatatgaacacacacacacactgtgagggtagaggtagagagagaacatgtttgtgcatgcatgtgtgtgtcaaaaataatatagtatctaatattatatgtatacacgtatattagatatatgtatataatgtatattcttgagtgacgtttttagataaaagggtaatatcaatacatatgtgtgtgtatgaatatatgtttatttttagcatttatcttaaggaagcagaacaggagcttggggatgcagctcttttggttggtagaatgggtgctattcccagcaccacaaaaataaatatgtaaataaaacattacacagtgttgttcttgcaagggtgtccattaaaaagctgtttaaatgatgactgggcctggtggaacaagtcttgggctagcacttggaaggtataggctggaggatcaggacttcatggtcttccatggctaacctgggctactcgaggccctacttcaaaaaaaataataataaaaataaaaagttgtttataatgggaaaattggcaaaagtaaacaataaaacaatgccctggttatgtcaaccatgcatatccacatatggtaagtgacaaatgccacaggatagctagtgatattaaaatgcatgaattgctaaaaatgagataggacctgactcacaaatatcaaaactagagtgctaagcacagatacactattttcatgatattgattaattccgggtactggaaatagtgggtaagacttttcttttttcctacaactatatttgaacaataaagtttaattttaatgtagcaattaaaaacaatgtaccttataattttagagatataacattgtttgtgtataaagtttagctttgacaggaaagaattaccctagctgaaaatatcctctagggtcaggcacacctttgaatgtttgatcctcctgcctctgcctcctaaggggtagggttatacaaatgagccaccttatttgactctaattcaatttttttgaaagaataacttctctttagataagaaagataaaagaatcaacagaaaagtttatcaaggaagattgtgaggaaagacatcataaactctttctgaaagtcttattctttgcttgagtttgcgagagtaaaatgagccccatctttctgggagatgacctgtaccatttctcagaagcagatcagacaaagggctgagcagcaaaggccctccaagacactacaggacagtgtagtctgaccaaggctcagctgagccaggtctaggtgtcacttcctatcagtcccccagggacagcatgaaccatcacctctagaagttttacaaaatttaagtgaaattagggggcagacagcttgggattgccccgttcttcaggggtcccctggtaagcattggggggttcccttaaatatggcagaaccctaacactaagtatgggggccacaggggaggacaggcccctgcttgttagttggagactggaaggggtgggggaattcctaaacactccatttacagagaaggagagccccttgttagtcacagttcccttagtacagggcatttggtggtagatatctgtttctgattccttcaaggtttctgatttcttgtaggttttagagacagacaactgaaataaacacacagagagacacacattctctctctttctctctctctctctctcacacacacacacacacatagacacacacacctactcctctcaccaatactatttggctattaattagttcaatggtcatagaatttaatttacataaatctagtattgctatttatttttttcttttcaggctggagctcctgaatgccaggctggcctcacacttaatatagctaaggatgaagtctggttctcttcctctcctttccaagtgatggagtcacaggtccatgctagcatgcctggtttctacagtcctggggatctaaccaaggcacgcttttatttttttatgctccagactttactctccctcccctctaagcccaccctgcatccaccctctgactgtttcacatcccacacctcctcttcacccctgactccacaaggatgtccccacctcccacccaaccagatctctaaactccctggagcctccagtttcttgagggttaagtgcatcttctctgactgaacccagacctggcagtcctctgctatatatgtgttggggcctcagatcagctggtgtatgctgccaggttggtggtccagcatttgagagatctcagggtccatgttaatgtatcattcactctttgagacagagtttctctgtatagccctggctgtcctgaaactcactctgtagaccaggttggcctcgaactcagaaatccgcctgcctctgcctcccaagtgctgggattaaagatgtgtgccaccacacggctccatcattcattctttaaaaattacttttatgtgtgtgttgggggcgggttgtctgtggagaacagaagaggcaactggatcccctggagatgggcttcctgggagtcctgagccgcacagtggctccccatcctgagtgtcactcaattagctcatgtttaaagataatttcagaaagaagccatgtggaaattatttaaatatttgtccattaattcattttttgagacaagatcttgtgtggcttaggctggtctaaagcctatagcagaggctagtttgaaatgatcctcctgcctcagcttcctcatttcagggattacagtaatgtgccaccatatctaacaacagtgtagacctataaaacataaggaaggatgtgcgtgtgaggaaaggcatttactcattgtgaatgccaagtagaacttgaactgttttggttgacttgattgctataaaaatacataggaagcagattctagcctaacttaatatagttcctattctacattaattagggattcaagcttgagatgaggtaagtttattagtttttgaataaagcagatgatatgaataaatacagatgacatttctcaatcttaatcttataattgattgatgtcagtaaccacttttttttttttaagggaaagaggctggggtggttaaaatataatgtatttatttgcaaaatgcttagagtcttaaaaaaaaaaacacattgaaaaccaagcatgtcattgtcacacttttccatactacagcagccacagcaggcaggttttccttcttcctccaaggtgtatggcacagaactgtctgaaaaatcaccaaccagaactcaccaactcagtctgagggcctttatccaagtacagggcctacggcacctgatggcaggtggcagtaagggtagatgataggaagacaccccaagtcaaagcttttggtggcatggcagtcccctcagtcagctcaccgaaattatgttgtcataggtgacaagtttacacaagtaaactcaaactcactttagaattcatcaattttatttcatatacaaaacttcattacaccaggtaccaaaattaaggcgaattaagtcaaagtggctttgaaaaatctaaatcgacacagctcaacacttgggcttagttcaatcagaagtgttaaggaaactgggcatggggctctcacctttaatcctagcctggactaaggcaggattgctgtgaattacaggtagcctcatctatacagtgctttctaggacaaccagggacatagagtgagacctgtataaacaaatcaaaagttccattgaggtaagctgggcatggtgacagacccaggctggagagttcaaggccagcaggctacataataatgctgtctcaaaaaaaagtgttagcaaatattaatttataacactgagaaaatgtgctttaaaaacttgtgtgcatgggcgttgttcctgcaggtatgtctgtctgtgcaccatgtgtgcctggtacctgagcaaatcccctgttgctgctattacaggctctgagcctccatacacttacacaggcagtcgcatacacaggctctgggaacttaactcttgagtcctcagacacaacagccatcaatctaaattttaaaacttgaaagatgagagaccaccatttatcaactgctctcttcactccactcccaccccaaaagggaaactccaggtgggtggatgtctgtgggttcaaagccactgttgcctagtgagttctaggacagctagggctacatagtctttaagaaagaaagaaagaaagaaagaaagaaagaaagaaagaaagaaagaaagaaagaaagaaagaaagaaagaaagaaagaaagaaaattagccgggtgtggtggcacacgcctttaatcccagcacttgggaggcagaggcaggtggatttctgagttcgaggccagcctggtctacagagtgagttccaagacagccagggctacacagagaaaccctgactcgaaaaacaaaaacaaaacaaaacaaaacaaaaaattaagaaaggcaggggggaaaaaaacaggaaagaaagcctgaaataggctcaaacatacgaatttttaaattaagcttgtgcaacatggtggttcacacctgtaataccagaactcgagatactgaggcaggatctttgtgtgtatccctggctgacctaaaatgtagactaggctggccttgaccctgtttcaaaaatcgctcccaataaataacagataaatcgacctcactttgtgaattaatgagtgtaaacgtgctaatgttttccaaatagagcatagttaatggggagggtgaatttaagggttcttaattggcaaggcctctttctgaaaaacaaaaacaaaaaagtaaactaatataacttagggaggttcatttccagcttagaccgatgtaatcactctaaattccatacgcgatgccaagagcttttctcaaaatcctaaaaattaattctcatctacacaccctgtcttcggagctgcactcccttcgcggccgcacgcggcgcccgcagcagctgactcctccccgttcatggggaaaaccctgcctaatatttataacgctatgacatactgtaatactcacaaggtggttgtagaagtataaacacgactggagatatctgattggctgctggtgatgtaacacccatgtcaatacttcccactgaacgcacgtgttcgaccttttatttaaatttccatttcatcacagcaataagacactcggggcggtgcattttctgcgaaacgatcgtcgcccggggccagaggtgctgcccggcgtacacaaggagcccaaggaggtgtcctcgcgagggaggcaccgcctggtccagtcttttgtgcaggaacaaaataagttcacttcctcgggcacggccacccacccctcccccggcagatgacagggccgggcgcgctcccaccgcacttactcctggagtcccaggtgaagtcgtggcgagagccggggaccgtgcgcacgggcgcgccgcggcgagccggcccctgacacccgccagctgtttgtcctggccgagccggccccgnnnnnnnnnnnnnnnnnnnnnnnnnnnnnnnnnnnnnnnnnnnnnnnnnnnnnnnnnnnnnnnnnnnnnnnnnnnnnnnnnnnnnnnnnnnnnnnnnnnnnnnnnnnnnnnnnnnnnnnnnnnnnnnnnnnnnnnnnnnnnnnnnnnnnnnnnnnnnnnnnnnnnnnnnnnnnnnnnnnnnnnnnnnnnnnnnnnnnnnnnnnnnnnnnnnnnnnnnnnnnnnnnnnnnnnnnnnnnnnnnnnnnnnnnnnnnnnnnnnnnnnnnnnnnnnnnnnnnnnnnnnnnnnnnnnnnnnnnnnnnnnnnnnnnnnnnnnnnnnnnnnnnnnnnnnnnnnnnnnnnnnnnnnnnnnnnnnnnnnnnnnnnnnnnnnnnnnnnnnnnnnnnnnnnnnnnnnnnnnnnnnnnnnnnnnnnnnnnnnnnnnnnnnnnnnnnnnnnnnnnnnnnnnnnnnnnnnnnnnnnnnnnnnnnnnnnnnnnnnnnnnnnnnnnnnnnnnnnnnnnnnnnnnnnnnnnnnnnnnnnnnnnnnnnnnnnnnnnnnnnnnnnnnnnnnnnnnnnnnnnnnnnnnnnnnnnnnnnnnnnnnnnnnnnnnnnnnnnnnnnnnnnnnnnnnnnnnnnnnnnnnnnnnnnnnnnnnnnnnnnnnnnnnnnnnnnnnnnnnnnnnnnnnnnnnnnnnnnncgccggcgcggccgccgccgaggacgtcaaggagttgctgctgctccctcaggacacgggcggcccctccttgctgggcggcggcgcggggggccccctgctagcggaaaggaaccgtcggactctggccttccgcgggggaggcggcgggggtctcggcaacaatggcagcagccgcggccgcccggagacctcggcgtggcccctcaggcatttcaatgggcgagggccggcggccgtggatccggagctggacgcgctggaggggaaggagtggatgcaggacggggcgtccctgagctacagcaccgaggaggagggggcgagcccgggcgatggcagtggggcggaaggcggcagctgcagcagcagcaggcggtcgggcggcgatggtggggacgaagcggagggcagcggtgtgggagctggcgaaggagagactgtccagcacttcccgctcgcgaggcccaagtccctcttgcagaagctccagtgctccttccagacctcttggctcaaggacttcccttggctgcggtactccaaggataccggccttatgttctgcggatggtgccaaaagatccccgaggatgggggcggcgtggaccttacccaggtggggcatgatgagctttcgcgagggacccgcaactacaagaaaaccctgctcctgaggcaccacgtctccaccgaacacaaactccacgaagccaacgcccaggtaccgtagatcctgcccttgcttttcgaccacatcttttgggaaaggtttatcagtggggaagactaaaactaaagtaaagaaggggggaaattaagatcctccgggggaagactcacttcgttccgatcgagagaggttctcgagagcttatgcgtaggggtttagaaagcctggaaacaaagttttccaaagttgtggatctattgggggaggaggggtagaaggacagttttctaatgatatcgctgggtttatcttctttttcgagttagggtttgcctgtgagattgaatccgagagagaggctgggagaggttggagattttaacctttgattgactttcggtcaaaaaggatttttttttttaagtcagaggagattttagaactgtcccttcttgtgttcgtagacactaaagtactagaagtagcctgaagaatggattaaacagtttccttaagcttcggtgctacaggctgtccactcttaaactcgtgtcaggtcgagataatgtgaaatatgagaggcttatgcaaatgtacaggaagttagttcagtagggtaaataattttacgatgtccgtctctgttaaacttgtttggtataatcattgtacactttagctagttacttactgatatttctcttctgagtgtattatccttttcaaaaacatggtcgtgaatagcttatatgaagggtgttaatcttagctctggaaatgtttaatgtgaagtgatttgggcttcatttgctcactggaaacctagttacagagcaagcctacctatgagctttagtccccctcccccctttttacaggagcctgaccgttttgatagcccttttcaagtcaaatagctgttggtcagtcttcctttttatgactcagacaacctgtggtggtgggtggaattgattcttttgtgttgctgaccgacactcaggtattagtacctcaccatggtgtttatgggagccatcctgctgctcagcacacttacactatagtttattagtcacacaagtaacccagcttagagaggctttagttttaaaagcatgggttattttgtttggttgggttttttttttttcccccagaaggcagggaaatggagcttgtttgggttgagtttttatttgcacaaaatttcctaaatcttagaaaggtctctcccctatccgccccccccttctttctctcctctctagggtctctggctaccttggagctcttaagtatatagaccaggctggtttcaaactcaccgatctgcctgcctctggagtgctgggattaaaggtgtgtgctaccacaccttctgaaggtcacttacttttaagatgtaaagcccatttagtaaattgccttaaaccctggatgacagcctgaggctagtgcttataaagacttttgtaatgggggaaaaagtgagctttgagcaaatgcaggttctgatctcagttttctttatcactacctttggagtttgtcctggaagtttgataggcctgacacttttgttttagctgtatcagactcatttacattatccaggaaagtaaatttgtttccttttatagaagaagcatttcagtcattaaagggttaaggcttttcagtctttaagagttaagtaataaatacctggaagtatttagtaagatgatagaagctgtggcttgtgaaaaatggaaggctgaattttccaagtattggtatgtaagtattttagatttttttaattggaatgagtttttaaatctagtatttagaatattctgttctgtaggcaaacatgagtgggactaaaaattagctgctcagtgatccataactcagaggggattaggtggataatcttatggtccaccctagtaaatgggtgtatcctgcaggcgtgtacctaggtctccagagctcagttctagggaaaaaccttttgtcaacttgactctgaactaccctttccatttcccgacgacatggtggttttgtgtgaggtaggagccatcccactttttaagacttgggttaacgccttaaacttgaggagttatgtattggtttccttggttgaattttaggtgttaccacttcatcatttatcttcacttgtgactaacctttgtttgaggaatagcttattcttccaagaaacacctgtaaagtctctttcccttgttaacagtgaccggttcctagcaggatttgatggggtgggggttgtgtggttgttgttgccctgtagcctttggttacctttaggaggcagtgtaacattctgtaagaacattcttgggtcctggtcctctaaccgttattttgtatcatgcttattttattatagcttactcttagacaagcgtgaagacagtgtcttgtcccctggttggcctcatgcctgctttgaccctcttacctatttctcaatgtttggactcctggcccaccaggccccagtgagggtttaactagtgttgggtagctgatctggtaccttaccctgggtagacccaagctctcactgctgagcagcactccccacgcccaagattggtttatttcctggtccctcgttcataagtgccagcgtttacatttttatcttactacaacagaatcttgggtagcatggtttgacctcagaatgtctttgtgtcatccattttgaagccactttgtaatggtattactcttgaatggagagcagattatttccccattcatactttccaagactgaggcccataagcctgggcattttgagtttttctcactataaatgtaattcagtttcatagtgtcctgtattattagcttcctcattttaaaaatgagatggaagctgctgaagagatggctcggtggttaagagtgcttgttgctcttcacaaggtgaggtctggttgtcatcacatggtagctcatagccatccataattccagttgccagggcatccagcaggcgcaaatgtgatgcatgtgtgtgtggtcatacatataaagctcatgggaagtgaaaatatgaaggtcatcttcaggtatatacctgagagacagtgtaaaaataaaatactgtatgtgagttctgaaactcaggaagggctgagtttgacctgggcatgctgtcaacattctcttaaacccagtgctgtctaaaactcaaggcaccaggagctcagctctagagcagccaatagggctctgtaatgtaatgagaccctgtaggccggaagggtttactccctcctttcctcacacttctctttcctttgagacacagcctcactttggggcagactgagtttgaattcatgatcaccttgcctctacctccagttcatatggatagttctaagacttcctttcccctagcccctaggatttctctatgtagccctggctgtcctggaattgtgtatcctagcctgacctccctgcatgctgggattaaaggtgtgtgtcaacacatccagccctcattcatttcagtttttctagaggtaaggatcaaatttaaggtctcatttatgctaggaaatcactctgccgctgatctgctccttttttttttttttaattaaaagaccttttgtgatgtcataaatgtttaatttccctttttattatgtgtgtgttgtgtatatagtgggtgtgcacacttgggttgcaggtgcctgaggaagtcagaggcatgggatctgctggggaacttagtttctgggcttgtgaatcagtcacctgatgtgagtggtcagaatgagatgccagcccttggaagagcagcaagcgctgcacggtcatcgcttcagtctctgattgcttcagtctctgctgcgctgcttttattattattattattattattattattattattattttgctattggtttttcgagacagggtttctctgtatagccctggctgtcttggaactcactctgtagaccaggctggtctctcgaactcagaaatccacctgcctctgcctcccaagtgctgggattaaaggcgtgcgccaccaggcccggctgcggtgctgcttttaaagacagtattttactttgcttcatagcctggctcagtatccaacagaagaccccagtaccctggtcttgtaagtgatgggacttcaagcttgtacaatgctgggtgttcttgctcattagtgttttgagacaggatctcttcatataggcctggctagtctgaaactcactttgtagatgagcctggccttgaactccagagattactgacctatctctgcctcaggagttcctggggctaaaagcatgtgttggatttttgagttaatatgttgttattagtacattattaaagtttacttttatttctcattttcttgggaggtcaggtacgggaattgaaaagctaaggcctcttgcacactggtccaagctttactgttgaactgtgtctttagtgccccttttacacagaggcatggcttctttgtgtagccctgactggtcctcctctgcctcactgtgctggaattaaaggttgtgtgccgcctccaccaccaggccccccctccccccatttaagacaggatcttgtcaggcattgcctaggctggtctgggactcctacctgcaagccctggtaggccttgacacttgtgagtgtcctggttcaggctcctgagttgctggacctacagacatgttctttgcccaggacttgtttcttattctttatataaaagtcctttcttttccttctcttcttcctccctctcctcctcctcttcttactttgttttggtggtgaccaaaaacaaacaacaaaactttttggagctaggtttttgcaaggttccacaggctcgttggagcctaaccctctggtcatgtcctgcctgctccctggtaattggaagtccgagtctgtccgtgcacttgggttcagggcctgtctttttacttagaccttagttgttagggaccgaccccaaggagaagtggggctttggctttggtggtggggtttggggttttgtttttgaagcacagtttctcatgacctcaaactcttacgattattttaagacgtgtgtggtgtgtgtgtgtgtgtggtgtgtgtgtgtgtgtgtgtgtgtaggctggagggcagcttggtggatgttactctgtaagttgtgggctgccaagcaccattagctgtcaggtttatgtgatgagcactcttaaccagcttggggatctctgggacttttacttcaaattgtgcctctattgctgggtctacagatacatatctgtaggcttggggaagaactgtgttgtttgggggaggcgttttgatcctagggttctgtgcatgctcgctagtcaagtgccactgactacatcctccctgggaggaatcgaagattcttgtaagagaggaccctccattggaaagtaagacacttgtttggtgctggagatctctatagtttttttaagtatcctcagagtcaatttcaagaattatctcattcagaatttggccatttggcccagaaagatttttaaattgctttaattatagtgattaccactgtagcttggttcagaccactttctacccaattgtgaaattctcagagcccagatcactcattctgtcaactctatgcagtctgctaggcctacagcgtacacccaaattattattattgtaagcttagttaacctttccagaaattaaacatgaattcaacccagtgatgtgattgaaattactagttggaatacgttgatgtcaggtggaaaagagaaaggtgaggcaggtctgccagcccttgctttggaaacaggaagtcccaaaggttagttgtatactcttgcttttttggctagtttttaacaacttagaaagaaagtgtttttttgttgtgatctatgtatacatacttggcatgaatacaggagcatgtgtgctatacagcatgtgtgtgtgtatggacacaaatggctaacaacatgatttttagtaagagaatcaaatgtctatgtgctcctatttagaagtaccagcatactgcatatgtgggtttacaatttgaggagaaagcttataataaagatctatactagccgggcaggggtggcacatgcctttaatcccagcacgtgggagacagaggcaggtggatttctgagttccaggacagccagggctacacagagaaaccctgtctcagaaaaacaacaacaacaaaaaagatctatactagaggccaggtggtgatggcaggacaggtttttaattcctgtacttgggaggcagaggcaggggaatctctgagtttgaggccagcatagtctacaaagtgagttccagaacagctagggctctacatacatacatacatacatacatacatacatacatacatacatacacacacacacacacacacacacactcattcatattcattctctctctctctctctctctctctctctctcacacacacacacacacacacacacacacacacacacacacatgtatgcaaaaccaaggattagaatcacttgaaactcagctcctcattcccaaaaagaattagaatttatggtggatgtggtattgtattgtattgcctaccacataggcagacagaggtaggctgatcttcgtgttggtctgcatagtggattccaggccagctagggctatgtagtcagaccctgccttaaaggaaatgaaacaacagaagtagaatttctagggatagtgtttgagccataaaagagaataacatcaacacacaaggcactgtaatagagatgatagactgcagaggagaactgatctacttttttttttaaatcggcagttaaatgcgttagcaccagtagaagattgtgattatatttgctatgaccttgtttgtcttcacattctagaaattgaattttatttttaaatttggaagtagaaattattttctctcaatatactgttcctagtgagttattgaaacaaagcaatactgatttttatgtactttaggttcatatactgatacttgtgaaaatgtcttttctgctgattatcgtagacaaaattctgagcaagaaaggaaaacagccttttacactaagtgtttttctattgttgttaatgggctgataagctgtggtcaagtctgtatcagttagctttgctccttcacctcaaagggggacttgcctagtggtttacaggttgcagtgaagttctccaaggtagaatggggaaagagtaactgccatctctcccaggtctcatcgccccttaacatcgccttccctagtttcaaggtctttgcctcctctaatacattacatcacactctccccctttgtaaataagccaagaggaaacagtaaagcctggctggccttaaattcgctcttttcagttttgtgtgtatttgtctgcatgtatttatgtgtataccacatgcatatctcatattagctgagtccaagagagtctcctgtgagacatgacatggataccaggaactcagcccaattctctgcaagagcaccaaataatgttctgagctctctccagccccggaactcaaccttcttcactgaatgattttgaactaatggtctttgtctccataaccccagtgattgggctacagctgcatatatcactgtacctggtcttaggcagtgctgtggatcaagcacaggacacaggactttgtgcatgccagacaagcactctaccaattaagctactatgctagaactattaacagtaggttcccagctggtcatagcatttgtcttcattctctggtattgattcctcttcacatttctttcttcagtctgtcagccaatccaatgtatcttttgttaagcctggacctacacccacacccacacacacacacacacactcacacactcacacacactctgtctctctacttgtctctttctctcacacttacaattaaaagttccataaggcatacataacagcagttcttgccctttttgaaagataagcttttatttatttgtatggcactgggatttgagcctagggttatcataggcagccatcccagctcattacgttttcatttaaagtcaggcatagtggcacatgcctttagtcccagcacttaggcagaggcaggcttatctttgtgagttccaggacagccagagctgcacagagaaaccaaaaccgacaaagcttgaacttgagaccctcctgctttagcttcccagtcactgccaccgttatcagcctttgtcttcaggctcagctctatcagtttattgtggtccttctgtatatagctcagaatggcctggaccttgttattgtcctgttcatatcccaggtgttgggattacaggcatgtgtcactaggaatggaagtgctgcttgtttataaatctgatggacgtggggggtgtttacatgtgggaactgtgttgtttatttgtgctttatggacactgggttacaccttgcatctcttatgaatctagacttttaaggatgctacagagcatcttggttatctttttaaaatggtatctcatttgtttaaaatgtgcagcctcctgccatattaatttcttatcttcaaagcacctctgtccccacagggaaattggaatggacaccagctcttagatagcatagacctgaatcctttaacattttttactctaatacaaagatttgattaaaggaatttcttaatttactggattcagcaaataatgtctttatttgctgtgtctacttagttgttttgcaaaaaaaaaaaaatcttctaatctcttgggagagaagataaattcatgactttttttttttaaagatttatttcattttatgtatctgggtacaccataggtgtcttcagacacaccagaagagggcatcagatcccattacagatggttgtgagccaccatgtggttgctgggatttgaactcaggacctctggaagagcagtcagtgctcttaactgctgagccatctctccagcctctcatgacattattttgaagaattttttttctttaaaaaatatttatcttatgtgtatacttgttttgcctgcatgtagtatatgaagaacatgtatacctggtacccaaggcggccaggaagagggtgttgaataccctgggactataggaatacatagtgagacttcccatccagaaagggaaggtaaaacccacattaggagggggttatatctaattattgcaaccatcttaaagctacgtcattagatcctacattttctgaagtggtcccaccaaattatgtaattatgttacatttgtcacacaaaatgtccttatttttaaaaattacttgaaattgctttaaaaattacagaagcctagccacaacatacccatattatacaaatgaaatactatgtaaccaccattgttttattgccactgtagaccaccacccaccgtttgctttcacagagtgactcctttcccacaactcacggaaggataagctgtgtacaacagctactaagacagccctttaccaagctggcagagctcagggtgcttagggacatttgttgctattagaggaggagggggacccaggttcaccttccccacacttagagattggctcaattgtatattccagacaggcnnnnnnnnnnnnnnnnnnnncacacacacacacactcattcatattcattctctctctctctctctctctctctctctctcacacacacacacacacacacacacacacacacacacacacatgtatgcaaaaccaaggattagaatcacttgaaactcagctcctcattcccaaaaagaattagaatttatggtggatgtggtattgtattgtattgcctaccacataggcagacagaggtaggctgatcttcgtgttggtctgcatagtggattccaggccagctagggctatgtagtcagaccctgccttaaaggaaatgaaacaacagaagtagaatttctagggatagtgtttgagccataaaagagaataacatcaacacacaaggcactgtaatagagatgatagactgcagaggagaactgatctacttttttttttaaatcggcagttaaatgcgttagcaccagtagaagattgtgattatatttgctatgaccttgtttgtcttcacattctagaaattgaattttatttttaaatttggaagtagaaattattttctctcaatatactgttcctagtgagttattgaaacaaagcaatactgatttttatgtactttaggttcatatactgatacttgtgaaaatgtcttttctgctgattatcgtagacaaaattctgagcaagaaaggaaaacagccttttacactaagtgtttttctattgttgttaatgggctgataagctgtggtcaagtctgtatcagttagctttgctccttcacctcaaagggggacttgcctagtggtttacaggttgcagtgaagttctccaaggtagaatggggaaagagtaactgccatctctcccaggtctcatcgccccttaacatcgccttccctagtttcaaggtctttgcctcctctaatacattacatcacactctccccctttgtaaataagccaagaggaaacagtaaagcctggctggccttaaattcgctcttttcagttttgtgtgtatttgtctgcatgtatttatgtgtataccacatgcatatctcatattagctgagtccaagagagtctcctgtgagacatgacatggataccaggaactcagcccaattctctgcaagagcaccaaataatgttctgagctctctccagccccggaactcaaccttcttcactgaatgattttgaactaatggtctttgtctccataaccccagtgattgggctacagctgcatatatcactgtacctggtcttaggcagtgctgtggatcaagcacaggacacaggactttgtgcatgccagacaagcactctaccaattaagctactatgctagaactattaacagtaggttcccagctggtcatagcatttgtcttcattctctggtattgattcctcttcacatttctttcttcagtctgtcagccaatccaatgtatcttttgttaagcctggacctacacccacacacacacacacacacacacacacacactcacacactcacacacactctgtctctctacttgtctctttctctcacacttacaattaaaagttccataaggcatacataacagcagttcttgccctttttgaaagataagcttttatttatttgtatggcactgggatttgagcctagggttatcataggcatccatcccagctcattacgttttcatttaaagtcaggcatagtggcacatgcctttagtcccagcacttaggcagaggcaggcttatctttgtgagttccaggacagccagagctgcacagagaaaccaagaccgacaaggcttgaacttgagaccctcctgctttagcttcccagtcactgccaccgttatcagcctttgtcttcaggctcagcatgtgacacatgcctgtaatcccaacacctgggatatgaacagggacaataacaaggtccaggccattctgagctatatacagaaggaccacaataaactgatagagctgagcctgaagacaaagggctgaaaagggaaggtaaaacccacattaggagggggttatatctaattattgcaaccatcttaaagctacgtcattagatcctacattttctgaagtggtcccaccaaattatgtaattatgttacatttgtcacacaaaatgtccttatttttaaaaattacttgaaattgctttaaaaattacagaagcctagccacaacatacccatattatacaatgaaatactatgtaaccaccattgttttattgccactgtagaccaccacccaccgtttgctttcacagagtgactcctttcccacaactcacggaaggataagctgtgtacaacagctactaagacagccctttaccaagctggcagagctcagggtgcttagggacatttgttgctattagaggaggagggggacccaggttcaccttccccacacttagagattggctcaattgtatattccagacaggcctacaaaatgaacttcctgccttggctttccaaagtctgattatagggctcctgatcatactgcttgttatttaaactttaggtggttgtttactttgaaatgctaattcactgccccccacagacttcatagaaatgctgccatagtttgtcagattccttcttccaagggatctccccttttctgcactatctactaggtagactcagaaccaaacaaatggacctgcttgttagccaggtctacagcagcatgcatcacaatgtttagagctaggtctgtaccaaaaggaaagttgtctttcatgcttccaactgtctgaagagcaaggtaacattcagattgttttaatttaaacccgggttcagcccggcgtggtggcacacgcctttaatcccaaatcccagcacccgggaggcaggtggatttctgagttcgaggctagcttggtctacaaagtgaattccaggacagccagggctgtacagagacccaggtttcatcaggtctgtgtgattggctcttttcatagaaagatagaactttattatggacatttttagaattgtcattttatgtaactcttttgctaagtagtttgaaattttgtaacatggcttgtatatcagatttatgttttaaaaaatagcctcttagaactcgggtaggtctcatgcatattctttgccagggattgaggagagaggagagagaagggaaggggaggggcttattagtgaagctaaagcatttccctcccagaattcacactgtagtactggctgcctcgcctgccttaggagtgctgggattaaaggctttattctaccatgcgtgctccagctatcccctcatttttgaagcctcacttttttcaaagcaaaaagttaagacttacactaatgaataggtttgtttcacctacgttattcttgtagagtttttgaagatcattgagtcattttagtagaggaaaatggctactgtagagcatggagcattctgtataataggatgggcttgggatgtttgctacagcacaatggcttcatgagacttaatctccactaagattaaggctgccaaaggcatagtgcagctagatttctactgtgtttcccattcttcagtctggagcagctctttacactgcaggtccgcaggcgctccgtcctgctccgtcgtgctgcagcagcagtgagtactagagtgccaacagtctgtgctgctgctggtctcttactcgacagttaacaatgggaaagagtgcagaaatactgcgaaagcagtgttgaaggtggtggggatatacaaaactctgcctgcaggacttgcctgtctagttactagtgaagacacgttaataataagaacgaattttaataatattactaccactcaaggcctcagggaagactgagttgccaaaggacacattctgaaattagatcatactctaatttttatagcatgtaaatcttgaagattagttttattatttggggtgggggtgtagttgctttgcaaccaaaagatggtactagatcccctggaaatggagttaacagatggtttttcagccaaccatgttctgctgggaattgaactgaacccactcctctgtaagggcagctaatgatctgaaccattaagtcatttctccagccatgtcttagtgttgtatgttttttcttgcagtgctggggattgtgccagagggcacaccctcctccccgacacctcctttaggctggtctcaaacacactgtggagttggggatggccttggactcttcccctctcagcttcaccagtatgattacagctttgaactacatggtagcttaattgctatataggaaccttatttaaagggatgctaaatagaattagaatgaatacttgcatacccaatgaaaagcaaaatttatatacatcaaagcctcttgaattcaggaatttttaatcaccttatagatgagatagtatttgtgaccataaagagaaggcattttgaaagttgactagaaaaataactggatatgctcatagtggaaagaagtttccactagtttagatttaattaacatcattgatctgaaccattctattacagtgtttgcctgaacttaagtttacctttctacttcctttggcatctgctttcctggctgatagagcagagtgatttgatctcaagtaaatgatcatttctttcttttgtggggggtgggggggtggtttcgagacacggtttctctgtgtagcaccagctgtcctggaactcactctgtagaccaggctggcctccaactcagaaatccgcctgcctctgcctcccgggtgctgggattaaaggcgtgcaccaccacgcccggcgataatttcttaagaaaataattgttacttttaagttttgaaattcattcttagcttatatgtgaaaagaagccaatgaaatcatgctgatccttggatgtctttctcttgcttgccccctcctccccttccccccctctttctctctctctctttctttctttctttctttctttctttctttctttctttctttctttctttctttctttctttctttctttctttctttctgtaatagcgagttgcgccagccttgatagacttcttttggagtttaatatggtgaatatttttatctcaaagtgtataactattcatgaattgtcatgcttgaataatgatttaacagttatatttgtttcccttggacttataaaaatttattataacatttatattataaaatttaatgttaatgtttttctccaattacaggagtcagaaataccatcagaggaggggtactgtgactttaatagcaggccaaatgagaactcttattgctatcaacttcttcgacaactagatgaacagagaaagaaagatattctttgtgatgtcagcattgtggtgagcgggaaaatctttaaagctcataagaacatcctggttgcaggcagccgtttctttaagactttatattgtgtttcaaacaaagaaagccctaaccaaaacaatactacccacttagatattgctgcagttcaaggtttttcagtcatcttggacttcctgtattctgggaacctggtgctcacaagccaaaacgccattgaagtgatgacagtggctagctaccttcaaatgagtgaagtcgttcaaacttgcaggaatttcattaaagatgccttaaatatcagcattaaatcggaagctccggagtctgtggttgtggactataacaataggaagccagttagcagggacagcctgccttcatcctcacgggaacagaagatcgccagcttctgggcaacgcggaacctgaccaacttggcaagtaatataaaaactgaaaacgaaggctgtgatgtcgacgagggccaagtagaaaactaccagatgaatgacagtaactggatccgggatggctctcctgaattggctgaaaatgaatctcaaggtaaaacaaaagtgtttatttggaataatatgacctctcaagagactggcaaagcaaggaggaaaaaccaaactacaaagagatttgtttataatataccgcctaacagtgagacaaaggtagaagattgctcagtgatgcagccccctgctgcctacccagaagaaagcaaggccttactcatcaaggaagagccaggtaaggttgtcagtccagttttgtacctgctgaagtttacttttaattattaatgtattagaactaaggatacttagttcttagttttgggtcttttgtgtgtctatgtgagtttaagttttagagtgggtggtaactaaagtaccacctgccaaaagccttattaataactatgtaacagactctttctgacttagggtaaggttgtatctctgtaaacaccataagatcactcacgctgtctttaatctttaagtcagaattgttaatatcctcagcccattgtatatcacagtttgaagagctttcttataataagtgataactgtgttatgtaaatttattagatgctaaccgaaactaaaagtgattttagggtttgccttttcataatttggaaacattttaaattggactctcaaatcccttcatcagtattgtcaaggacagtatcagtattatcctattggcagcctctgcactactttatgacagtgtttagttgtaatgtgtaactaatcactttgtctcctgaaattcagttgtaggatctagttcacatttaaacatttattgttacagaagtttgctgattccaagatgactctttagcgtgactctgcctattacaggtctccagaagcaggaatgcttttcttattgtcacctgactgtcattgtcatttgaacagcttgtggtggggtggactattagcctgttttctgggggtggggctgtttctgtggaattgcagtttttccttccaggccatggagctcttattttcagtatattcctagacagtgtatatactgtgcaagagtcgtagcatgtcatattggtggtaaagacctttttatctatctatctgtttgtttattttttaaatgaaccgagtgaaggacttctagaaaatggaaaatgtagacatttaccttattttaaactggctgtttctaactttgaaacatctcagggatttgacatttcctatccatattttaggtttgtgcaccattagtttagtgatttaatgcctgtttatctcaaggggcttgagttgggtacacttacacttcagcattttcatgacagaggcaggtagatctctgcaacttaatggccagcctggttggtctacagagcatgttccattacagccagggctgtcccaatagcaaacaaaaccatgcctgtttagtgtctatgataatgatggagtattttatgttaaatattcttttacttatccatttatctgctgtttctctctccctctctctttctctctctctctctttgtgtgtgtgtgtgtgtgtgtgtgtgtgtgtgtgtatgtaagtgaaccatagtacacacatgcaaaattcaaaggactgctttgtggaattctcatgttatgaaggttccaggaataaaacttaggttgcaaagcacctttccccattgctgttcttttttccttgtattttatgtcagttcttatcggcaagtccctactgagacttgtgttagagacaggctctaggacaggctggcctctaattcactatgtggctgaggatcacccttctatccatccttagactcttggctttaccttccaagaacagagagtagagggctgtgtnnnnnnnnnnnnnnnnnnnnggataaaacttaggttgcaaagcacctttccccattgctgttcttttttccttgtattttatgtcagttcttatcggcaagtccctactgagacttgtgttagagacaggctctaggacaggctggcctctaattcactatgtggctgaggatcacctttctatccatccttagactcttggctttaccttccaagaacagagagtagagggctgtgtcaacactaacagtagaccccttagctagcactttgtttttggcttactaatacagaagtcttaacaattcaaaactggtaactatcaggactttctgctgcatttagtgttccactgtggtagttaactctgtcaagtgtttaaacgtatgtgtgtatgtgtgcccacacacatacagattttgagcacctggaaatatgcatacaataaaaatcctttggaaaattaagcaggtattttgagtggtggcaggaccaatcagagctaacactgttcttaacaactaccatataatattggagtgacttaaaacaataatattgacccagattggatactttcagaagtctttagcatttacttagcaattattttagcaagcattttcttaccatccatatcaatgcaccaggtctatcaaaaattgtggatagtttaatgagtcagtttatcccatcctaaaaaaagataatttttgatgcttttaaatcattggttgcactttggtacctgaattcataaatttggtttcatcatgacaagctgcatatcaactggtgacacttttataatttgatagtgtctctaaaggagagttacagcatcattcagtggcagaaaagtgggttttctctcacctaaacagtatgcaagatacaggaaaataagaggtcaagctagtgtttgtgtaattcacatatagctcatagtctggccttgctggtgggcagccctgtgagcaagtctgcattttgtgattgctcacaaggctgttccagagccaaagtgctcctatcaaagctctgcctatagtggagaataagaatggacagttgtagggccactcgtttgttctgtatgttcatctagtacaaagagatgaagctggctcctttttaagaattcccataaaacatggagcagcactgagcacctggttttgttagtaagcgggtggcactagcttctcagaagccctcatgactgttcattcacataacaccttccagtgcactttccccagagtaatacagactttcacttccaacatagttttaaagagaggtagaaatatatttcttgtgactttttttcaagtcagtttctctgtgtagccctggctgacctggaacttgctctgtagaccaggctggccttaaactcagagacctgccttacaagtgctgggttcaaaggcatgtatgtgcctttcttgtaacttttaagaatataatgacactaatctttggttagtttctatacctttgtttatataataaaaatcaaaataaattctccaaaagatgtgtcttctagaagacttgagttaaattctcagcacccatatagtgagtcaccaccagctgtaagtcctgggacttaacaccctctgagggcataggcacaaatgtgaaaagtagcgcgcatacatgcaggtaaaaggaaacaggaaagaaaatagaccttattaagaacttgatggtcagaaaatagtgtgagccatttttcttggagtctcactgtgtagctttggctgatctggaccagctccccatgtagcccaggttggcctcaaactcacaaagctgctttgccttccctgtggtgtgattaaagatgtatattaccatgcccagctgggctttgaagcagccctgacaaaaaagctatactttatgtttggtatggttgaaaggcctgtatataaacagaaggaactatttctagcaaagctttgtttagtccttgtcaaaaaaactgtctattaatcttagccatagattggaaaccttgagcattacaggtcaggataacttttagcttagggattccagttgaagttctatgtacggtgagtctacaaatggttgaatccactggtggaataaaagcccaggttcagttagctcttgaaaactgctcctctctgtatagactatgatgggtgtaagttaagctgggtactgtttacagggttatatgaaaattaaatgacaagttatgtctgtgcccttaaagttaaaaaagactattgaagttatttataacagttttccagtgctatgtactttctgccaaatgctagatagatggtcttggcttgctgacaacgatgaccttaagcagcctgtgtgtataatgacagttattagaggttaccttcagtttgagtcaaaattaacttctataatgcccccattctgccatttatagtagaatttggacatagttttaatccctctatctggattagaaatataaataatacctctctgaatccatgtttttctaatttaagtgctatttcatctattattgaatatagagaactgacgtttaactttgcagggaagtttgaccaatataacaagtgtagtgtttatttaaggtatggttgcctttcccaagattagtctcctggtaaaagtaggagccttcaaaatcatgtctgctgttaaaaccttaaaaatgtagttctgaacttgaaaatatgttaacatctatatcattattgtgtttaatttttcacttaaaagtaaaaaatgagcgagacatgcttttgcatgattttaaagctctcttataaacatctgaaaagtactagtgaatattttgaaatctaaattcaatgcttggcatatttagatttgtgagcccttaaaagggagtgtgacttgtatagtttataacgacagctctaagaatgcaccctttgtcccgttatgctgaaacgggggttgcaccttgtaacatcctctgcaggtttgattgagatggcacattttggatctgtaagcaatcatatcttgttggacttaactgctaggcttgattctatccagacatggagggaaccggggaggggtagcatgcttgtcctttgataccgagttgatagatttaaaaactgaacactccttaatcaaataaagggaaaaatgatcttatgatattaaaaaattttaactatctgaaatgaaatctgagatttgaactttagttattaggggtttttcagtcttggtttaaatgcagggccttgttagtgaggtgtgcacttaatccttcatttttatttatttttaaaaattctgacacaggttggtacaatatatcctaccttttgataaattttgtgtatagcttaggaaaaatttgaacttgtgatgctcctgcctcagcttctgaaacattttggtaactcagggtgctgccacaacctgtcttttgattattacatttttgttgttttgaatgtgcacatttgcagagttagtgcagtgcacatttggaactcaggggacaatttgtaggagctggttctctccttgtacttgatggctcccggggaccaactcaggacagtaagtgtggcagtgagggactttacagactcacatctcactggccctggcctcacctttgtaattgatgtatttgcctcccagggaaactgcatataagctggtatttagaacgcagttttgaggaacccgggctcaagctgcatgcctttttgggaagcctaataaagcatatatctgaaataattagtaattctagttatagaacttttatttttaaagttatatgctaaccagcatttctgttctcctatatttatggtgatagttgttcattattatttattaagaaattaacacatctatttatttgtgtgtgtgtgtgtgtgtgtgtgtgtgtttgtgctttgcaacttatggagaattagttctctccttgccatatagctcacagggactgaactcaggtcatgtctttacccactgagatatagctcacttgccattaaaataatattttatgactgttagacatttttgatatctcactattttgaccttgttgttataagtttgttaaaagcagagtctaaagccatggggtttactttggttgaggtgtgagttttacgtgtagccctgtcactggagagtccccagtgtgcctctaatgatctctctaacaggaaatcacaaaaatctctaaaaacccaagctcttaaagaaaattaattttgagaataaaaagtttattttgtgtattttcaatttttttcttgaatgtgaatatacctattttgtcatggagaagcatttctgttgttaaggcagagtctggctatgtacctcagcttagccccttgctgcagtttccccagtgctgcttttacacatctagtctgcatgttgcactgactataactatactataactataactatactataacccagtagggtgttggattaatatgcagtctccatttatgggacttggattcaattccagatatttaggtaaatcttggttttgtttttgtttttttgtttgtttggttgtttgttttggtttttcgagatgggtttttctgtgtagccctgtgtcagaatttttaaaaataaataaaaatgaaggattaaatctttcaggcatctttattgtagagtatgctgtgaaaagtaagccagttttgttttgttttttaaaatcacttttattagaagcatggcttactgcttactttaaaaattgggccatgaaatcttactgaacatacttttttttttttaagatttatttatatactactgaatatttggtttctggcagcaatatattagttggccaggttgttttaaatttctctctctttgaatttttgttttgtatgttatgttttgtatgaatttttgttttgtatgtatggtcactacgtgtatggttggtgccgtgggagctagaagaggaggccgggatggtgctggggattaattagatccaggccctggaagataagctggcgctcttaaaccctgagtgtgtgtgtagacaatgtgcctttcttgtttttttgtttttaataaggtggggcttgcttgcttgcttgcttggttcctgctttgctgactatgcttcgctggctggccagaaagtgtcaggggtctgcctatagagaaagcccagcattggcgcttataagggtgacacaaacaattggtaactgagctaatcactctctaaccacagcagtttgaaaatttttattcttaaagctgtactctttgaaaaaggttataatataacaaatgatattttccccttttcacatcataagaaatctagaaacaaaaattgtaaatctcaagataacaaacaatcacattaaaagaactgaggtatgctcagacttaagactactaatctttgtatgtcaaaggctaagctgtgatctttgttttatgacttggcaaaggagtatttgatctctaattagatttgagttatggagtgtactgactaggtctattggcataaatatgtctttgaatggtgaggaaaagaaactatgatgtctagtataagcaagacagggcagttgcagtctgtcacttgaatcagtgagtttgagtggaaaacaagtttctagggtgctacaggaactagtatttgcatttgggttgtaaatgaaattactgaatgggaaagactaaagagaaaaagatacctatgcctgtttatgaagagggcctgcttttagttctgcaactatctgcagacatttttatatgctatgataatttatgaatgctgtgtttatatgaaaatgaaatttgtgtagatcatttatctcgagttttatatgagtttcagctatttttgtttttttcctgccatcaattcacatgtcattcacatgagtattgggatcctgaagaagccaggctagcctgcgctgcacttagaaatggcgaatgctgaggaccctaagcaaagccaggggactccaccccagacagtgtcacacacaggctctagaatgattcctagccccccttttctgtgctgttaccttggtactaagattaccctcatttgatggtagtaccttgttccatgtgttttataacttgaaacactatactttatagtatttcatttatttcattttacttatggtttcacactgcagttttgtgtaaatattttaaagacagttttaataaaatgcccagactcgccttggacttgaccatcttcccacagagtttcctgattggctgggatcatgaacgtgtgccgtgtttcacagcaggggcaggggaacatggatcatttgggggcaaggagattacttgttggaattaatcatctccttagaggcagatttggggtcctcataggcttagggggaaacctgtcccacaggataccccttcacctcttttggggggggggggtccgtgaagcaggcagcaacttacgtagcttagttggcctcaacttgattcttgcactcagtgttgcagggtatttgatcacactgtggaaaaacctcgagattgtgctgtgtactggaaaaacctgtttttagttgtagtgtggctcagccttagcatacatacacttttaatccaagagctttctgcttgaatattgtaaataaagtcagccataggtcaagagccatttgataggaagggttattaacaacaacaacaaaaaacttagtaaggagtcaagaggactcctggtagagatggcacaggaaggagagaaagaggcatttctgatggttttttaatgcataggggtgttttgcttgcatgtgtatctatgtgtaacttgcttgtctggaacagatggaagcttggatgccagctcccctagaactggagtttcagacagttttgagccaccacatggatgctgggagtcaaatgtaggtccttttgtaggtagagcagccagtgttcttagctttccagcccaagagtaactgctactctcctaacaagactaattcctaaataaagccacatacttgtgaaagcctattaacaacagctagaaaattggccctgagatgtagttttggaatgaagaacaaatgaagtacttggttccttcaagagtcattccttagattaactgtatcacagtgtacttttgattttgtttgtttgggttttgtttgtttgtttggtttttgtttttgtttggttttttgagacagggtttctctggatatccctggctgtcctggaactcactttgtagaccaggctggcctcgaactcagaaatccgcctgcctctgcttcccgagtgctgggattaaaggcgtgcgccaccacacctggctttacttttgattttgaaggaaaacaacacagctgattttggggtgaggaatttcctacctagatctgtaggattaagattacacctggacgttaattttccttcaatgatgggcattgaatccaggggctcatgcatggtaggcaggtgttcactgatccccagcctcacaaaatgacatgtataatactttaggataggagataggaagatttaaagaactagttgatacgtatagatcatgaatgaggccagcctacttaagtgaccacccaaagaaccaaaaaagccagctggttgaggaatgcatgtagcagatcactttagtagaataattcaggaacagaacaagcatgtatgtcaaaccatcttgagagaattatgataaaaggttgtctgaacatttaagaataatgacttccagcagggcatagtggtagagcttttaatcctagcaattattgcagcagctccgtgtgcttggggctactattgggttgcaaaggtcaaagtattctacctcgtgtttaatactagtgtttgtgaagaagagtgaggtactctagctagttatctcctgtcccactgttgcatcctattgagaaaacagatactaacattcttaaaatgtgcctaagctctgctttcagatctctggtgtgtgtgtctgtgtgtctgtctgtctgtctgtctgagggggggagaggagggaagagagagatagagatgagagagatatgcctgaggaggatattttatatcctgctctgccatttgccaccttattcccttgagatacaggctctgtcactgaaccttgctagcaatcccaagcggtcctctttctgtgcgtgaacagtgctaacatacagaagcatccatcaacaccctccccatgggtctgctctgtgttgaatactcctttctctgttcagatgtcagtatctgtaacatctttagggacttagtttcttattgtttctctctcttccatcctatagtcaaatttctgaaaacattcccccattcttcccaacacaagccatttcttttttgtacttgccatgttaaccttccaagtattatcctaagagcattctagatactttgtgaatgggataattctagggtccttttatatacttggcattttttgagtggccttattctttgctccccctggcattgtttatcattatctggtaactcagaccatttttgttatcagcccaagcaccagatctgcagtcccctttttttttttttttaagatttatttatttatttatttttgtttttttcgagacagggtttctctgtatagccctggttgtcctggaactcactttgtagaccagactggcctcgaactcagaaatccgcctgcctctgcctcccaagtcctgggattacaggcgtgcaccaccacgcctggcctaagatttattttatgtatgtattttatgagtacaccattgctgtcttcagacacaccagaagagggcagcagatcccattacagatggttgtgagccaccatgtggttgctgggaattgaactcaggacctctggaagagcagtctgtgctcttaactactgagccatctctccagccccagatctgtagtcttatttattaaatttctgttcttggaaacaagtggaataataaaattcacatttggtggcatttatttaatttgagcacttttacaaaaaagaaaaaaagtccccacagaaagtcagttttcaacgtttagttagaattacttagttggcttagttgacttattacaatacaggttggttactgccaaccggctaacccttttgacaaaggtccctattagtgctggtatatggtctttaaaacccagtacatggatgaagagcagaatgacctgttaggggaaagcaagctgcccttttaaccatctaaacactacttcttaggtgtgttagactcaatgctctagactaaatgtcactctgtaccctctgtcccacctcgagtttgctctgctgccatcggaagatgacctagctaatctttccacaattctaattctgccaccaatccttgtgcttgctacactactgtacctatcagccctcagctttggttcctgagaactgctttccgcccaccctttcctctcttcttttctgcaccgcgacccctgcaaagggcaggcaggcattgggcagcaaatgcacagcctggggctcaggattgctttgtaattggtctctgcatcttctctaagtcctttcattctcattcaatgacaccatgaagtagatttttagaattcaaatagaagagctgtttcttatctaaactacttatatccttttaaaaaacaaagtatggaattcttagcataacccctcaaccactgttttatataactggctcacagtcaatgatactactagttcctcggtatttgagtgattggggttgttataattgtacaccggcgtgtgctgtatcacattccattgtatgaatgaggccatagcagtttatttacatactgtaaataccttctcagtgaaatgtctacttctttacagaagttgtatttactttaggggatccagagcagtcaaggatgatgatgccaaagatgtcttgaggcaaggagatagttgacaagggagggattttaaagtgttttcagatacttaactcccatgagtggaggagggatttagcgccgtaggcaccagctagtattagaagcaggaacctgagtagtaaagtcaggctaaactaaaaagcttattaaatcatattaaaagctataataaaccgttgaatcttaagatgttttattttaagatttgtgttttcagaaagatctttattcttaaactgcagactgtatttggcaagcaaggagataagagctcattggcacaagaggagtgaatgaagccagaatggaaagggtttacatacagcaaattactgataacactgaaaagcacaccccatcgtcatggctttaatagaaatactgcctctctaggtctgtccagtaaatcaagtcaactcttagccaacaacaacaataactgctcttgttaaatctccacctgaaattttaaccaggtctatttttgaacttagaacaactccaatctgcttttttagaacttgtcgttcatattacacgcattaacagttgatcatgattataacattttgttattcaactcaaattcctatatcagattcctatatatgctgaatatacatgagctaacaaggcgtgtagtcacatagccagttagaaaactagggttagtacctgagacacctgggttcttcacagaccattcctaacatttggacatgtctattttcatcatgggttaaaaattcaaattgtgcttaaaaaggtggctcctcctcaggatccaggtttgattcctagcacacacatagtggctcacagccatccacacgtcacgtacatgcactctggaaagacattgatacacaaagcaagtaaatgttcactgttttaggtatttttgtctgtcacataagctaagggtggttacagcatgcttacttacctaggctgtttagttcagagttctgggtttggttcacagcatcacacaacattgcaaataaaagcgtttaattaaaggtatttttcacataatagcacagttttcacaattattaccaagtcagaaataccatggcaagtgagatagcttgtaaaagggtctgctccacaggcctggcattccaagtcctggaacccacactggaaggacagactggactctgcaagctcatacacttacatatgtgggatgcatacagtattacatagttatcgggcattgtgtttagacaacgagaaaaccaaagacaagtaaagtattttatggtggcttcacctggagtttacacgctctgtgtgtggtgttgaaaggcttctgaaccaggaagaaaggactgttcttgggtggctggctctggtgcagtttgtaaatgaactcattgtgtgtcattttcagatttggatggtgcactactctcagggcctgatggtgataggaccatgaacacaaatttattggctgaagcctgcagtggtcaagatgctggggatgctggtaggtacagtaagatctttgtcaagaatgtatctgagaggttctgaagactgtagtgtgctcgtgagcctacttggctagtcgtgtgtaaatgcttccaattggagagcattcttaggttagttatggctgtgatgactttaggaactcggtaaatgtaaactggtaagtttggtttggttttgggggtggtgtctgacacatggcctcacatacatgcacacgtgcacagtcataaaaaaaatttaaaaactcataaaaataaatttaagaaaacaagatggagtctctcagagtttgcagtgtttactgatagaagcaagaagcagcaactaaaggttgtcatctctcatctaaaaagttaaaatgctccaaaatcagaagtttttgagcagcaacataatattctttaaaaaaacaaaatcctagatttgtgagctttcgagattccagaattttagaattagagatatcctacctgcattactatatgaatacgttttgtgcatgcctatattggaaaggaatgctgcaggcgagtcagagttaaaagtgccttgcaatgggagcatagttactaccatggaaaaactaaacagaggtccttattgttggaatgcagcagcccaaaggggcagttggagagaacgctttcatcaggttgtcttggcttggctatagaaagtgcagactcactgtgcgttacatgggtaaccctgttccttgcagcctgtcaggctttgtattagcctggttttgttttgtaccagttttttgaaacagggtcttactcttccttgtctgactttgtttcaacctcccagtttggggtttttattgttttaaaaaaagaatctgtgggaggtgtggtggtacaggttggtggtgaggcaggggtcccaagttaaaggtcattctctgctaccatggcaagttcaaggccagcctgggctgcataaggccatgtctcaaattggaaaaaaaatgaaatggctgtggctgaatgcaaactgggaaattatttggtggccactaaaaaagaagccgtacactagaattgatggttgattggatcaagtggcaaaaactaaagataaatgtatatatctatagatgtctgtgtatatatctatatatccttatacaggaaaaatctttgacccaataaattatatataaattttaaataggattaaattaagaaagaggtaattcctgactgtgttctggttttagttactgtagactaggcctttgttgctgttttctgtggcttttcttttttccattaagctcagactgttggaggttcaggtgtttatatcctttgagtgtgggaattgaatccaggagctcgggtttttgttcgggttttggggggaagacagatgggaaggagttgggtagttttgagattgggcttccttgtgacacatagctgactctgaattcagtcttccaagtatgagccagcacatgcagcttgatttagtttatgttaagataacttatcattgttcttataattgtattttattttctctggctctaattaagagtttttcccaaccattacttcaaaatcacttttcaattgtactaggagcatcacatgatttcaagtatggtttgatgcctggcacttcaagtgatttcaagtatgggttgctaccaagtacttcaaatgacttcaaattcggattgctaccgggtgcttcaaatgatttcaagtatggattattgccagaatcttggcccacacaagaaacgtgggaaaatggcaagtattggtcaactaaacaactacaaaattctaaaattccatgattaagtgcttctgagctgtgttaataattgttattcctatatggttaaatatagtattgataggtgctttctctttaataatatattaaccagtacatttttccctttaaggtgactcatctctaatcatgaacaagttgaaatgccctcattgtagctatgtagccaaatacaggcgaacactaaaaaggcacttgctcattcattctggagtaagatcatttaagtgtgaaatttgtggaaagatgtttactagaagagaacacgtaaaaagacattccctggtaagtgccttgaaacgctgttgatcatggaggtgtgtggttttatgccagggatatgtctgcagatcgtggaggtgcctggcatatacttggcaaatttaaggaagtatgctaagctgctttaaacagaattatttttgaagtgatattgtacttcatttagaaatagtaactatcctttcattactaattgtatggcttaatttgaatggctcaaatgctttctttatctgtactactgttatattgagttcttcctctttcaattaggtacataaaaaggataaaaaatacaaatgcatggtgtgtaagaagatcttcatgttagcagccagtgttggaataaaacatggttctcgacgctacggagtatgcatggactgtgtagataagtcacagccaggaggacaagaagttgtaaatcagggacaagatacagagttccctcgggatgaagagtacgaggaaaacgaaggtggcgagcccgatgaggagctggctgaagacggacaagatgaaaacgatgcacctcgatgggatgagtcaggaggcgtttatgtctctggatgattagctgacctactatgttcctcaagaatgctgcattggacatactatgaatcgacaattcggattgttgaacttgaaggcttgcaaaatatggtacatgctggatggtagttttgttgctgtgaaaaactgtagggttaaagccttatagcaaaaaagaatttttttatatttgcacaggactatacagcaaacaaccatgtggttggatacatggagtcctcacatatttcagtcagttgtcaaagtaaactattttttatttataggatatacagttaactatttgggttgtatgaaaatatagtccttgtcctttacagagcttgcttacattcatgtgccatttaacatgaatgaggaaatccatttatggaagtacaatgacagtgacccaatcgctctgccaatcaaaccactcaggctagtttgtactagtagagttttgtttctatttttattttattaattttattttttttaatacagattttcagtgaggggctttttcaaccccattggttctattttcttgtattttttttttcattttatttgcttcataacttaaaccaagtctcctctagtcttagatattatttcttaatttcgtgctgataggcatgcttataagaactggagaggtaatttattggaatgaactgactggctccccgccctcccttccctttttgacatgaattttactacttcacagatgaagaatgatgttacaaagttaccatggtgacgctgacaaataccactaaactgattatgacttagaagtaactttctcctgctgctctgatctgatagatggttgctctatgatgtgttctgacatggggtctggtttttggggatctgttactttggcactattcttgtttgcctcttagtgtactatacctcagccttatttgaaatacagaagtctaattgaagaatagtcctaggaaaatacataaaatgatttgttttataattcatcccccatgtccagtttggttagcttgttatgcaatataagtgaagtatcaggttttttttctcctgtgcccatttttatcattaaaatgaacacaaaatgtgcattctctttttgtttcatacttaccgggatgttgagtgtttttaaattgtagctgataatatatttttccattccttaaagtcaccacaccttgatgaaatctttatagtctccatgattcagcaatctacaaaaaatactacaagtaaaatgttgagcctttattgttccattatctaaattcctcaggagtcagagttcttcacacagttgagacttagtttatgtagccaggtgacggacgactgagcggacagcagcacgctcagcagcttgtgacaggctaacgtgccgtgtgtcaggagcagagcatatatataaaaaacagagacaccatattttcaactttcttttaaatacaaattgagtatattttcctattttatatcaagtagctaaattatgacagttgtgtggagaaaccacagagctgctttgacagatacaatctttttggtgctccatctgttcaaagttgaaaagttgattttctttttgaaagagacaaacttcatcattgcctctgatttcagtagaataatggtttgatattggacagtgacttcctgcatggataaatcagagatgaagtagtcatgttacatgttgagacccacctattgccctctgactcgtatggcagtctctgcatcccttggggatggcagaagagtttcattctggtttctgtttgaaatgaagagaaccccttattctctgtgtttgaaacaaatgagtgaagtgtaattctagaaaagtccaaagtagactaagttgggcagagatattatgatgaaaaagtattttaaacgtaagatgttgtgctttgtgaatatgtaagtataacataaagatttcttccatcccacctatccccttcctttaaaataaaccatagtttacaattggtagatctgtctatatataaatatatattaaagagcaaatatatatatttaaaaaaagatcacctaaatctgctttattagacagtagctcactgttgcgtagaaactggacgtggctttacattcttaatgtgctttattttcctcaagataggaccttatcttgaaacagaatttcctttattacttaaatcatttatgtatatctggtaaattatgaccaaatttttgttagattgcacacagtaaattgaaatacacatttggtacactacggaattgttgtgcttttgtttggtttcagttggaaacaggttcgatggagatgactttattactgttaatttaaatagtctataattgtccgttgccttttatgtcgtgttgtgacagatttggctatatttttagtcatctgaaatatactttaaaaagtttgtttttaggtaatccaaaggaaaaatgtttatactcttgaatatatatttgcctcagcctatattaaagtttctttgaagtaaacactttaccagaaacagaattgacagatttttctacttgctgactgcctaagttattttgtttcatggtcttgagaattgccttttctctagacctttttttaaaagtagttttagtactaaggtatactactggacgctcctatttttttaagtatattccttttctgacagtacaacttcaggaagttgataaatctctaagaagttttgattggtctcagaaaggtaatggattgaatactcagaattttgtctgaaagtctggcagagttgtacatttggtgaagtttttcatgtaatttatattttaaataaaatatttttagagtttttaattttaatgaaggggaagaacatacactttcatattccacagtggtaatgatactatgtcataggttcagatcatgtgttattctcccagacagtttcttccatatggtctctcatttgtcaaggttcttgactcaatttttttactagacaagttgctaaattttagcaccctacaagagctctgtgtgtgtgtgtgtgtgtgtgtgtgtgtgtgtgtgtgtgtgnnnnnnnnnnnnnnnnnnnntgggggcaaatgctatttggcttaagtagagccatcctaataaagagtgagttaattcattgcagaaaactcaagcacagtaagtacacagtgcatattagttgtttaataacaaatgtgaaccaagagaagaagtaaaagctggtaggaagggataaatcagggaagtgaggggccgggacttgcaaagggccccaaggatgaggagtgggtgtgggaggcctgacaggaaggaagctctgggaaacatggagtaagagatgtagttctttggtttatgactcaaactttctggtatgcccacacttttgtgttgtctgccttactttaacctataaggtaggtgctattctattttacaaataaggaaaggctcagagagattcagacacttgcctaaatgaccgcagctttctgtggagcggggattagtcaggtctggttcgaagccctgatttcctccctgtgagatgctctgttaggagtcctgttctctttggaagttgcttttgtcacttttgactcaagcacacctcactgccatcctctgtgagtggctgggatagtttcacttaattttaaaaggatggttttacaatatgaagaagtagatagaagccccagcttgtgtgccgttcacacccggatccttaagcttaactatggtacccaatctacacagttagaactaacaggtgttttcttagtttaggatttaaagtaggattatttattttgtttcttccctatctgctgtatcccagtcttcaagtgaagttgaactaggtagtttaaaacatgttagggataagcacactttgaaagatgttttcttgccctgaatttgagggcactgggcagtaaatttggaatacactagctattgagaacaaaatttgggggttaagaaagggatgattgaggccattatgatctgggagaagcagcatcctaaacactgtaaacaactcttctgcctgctgtttgtaaaagctctctggcaagatcttttacaaagaccaattttcttttttaaatgtaatttacctacctaatatttaaatgtcctgagacatgtatgtaaacttccaaaacctgtttgtctgtgtatttagaaaatacacaagaatctttatcaaacataaaatataaacttgtgagcactaaactgcttctggctttgtgaattttattgacccttaattgtgatttatttgcaggggtgctagtttagactcactgggtaagggaaccaccgttggaaggttagacactgagatagatgcctttgtacttggagtttacgagtttggattacagagtctgaggagggttgctaatggttccttggtatggaagtaagaaataaagctacctctttgcaagaattcttattcattatacttttagaatttttacaggatttaagaaacactgaaaagttccctctaatcacttctaatcgtttctcttggaaatgggatcgagactcaaaggtgaagcactacctcatatatactgtttattagacagaacatcaacttgtaaacaagtaaatatataagattacaaatttcaagcctttgaaaatttacttagagagttgcctctttgctgggcagacctcacctcagactcaaggtcatgtgtcccacccagcctctgaattccaggactaactaatgccgtctactgcaaccaaccttttgagttactaatgaaacagaggttggtgatggcgttggggttacggaggcacggtgcatgtgttgggtatggaattaagatgtgttcggtgtggtttcaagagggaatgattaggagcacttaagattaaaaagcagatcccagcactcgggaggcagaggcaggcggatttctgagttcgaggccagcctggtctacaaagtgagttccaggacagccagggctatacagagaaaccctgtctctcgaaaaaccaaaaaaaaaagattaaaaagcagttttgaagttttcaaagatgagatggggcagagcagttccaccactgagggttctagatgtgaaaaagattgacagccaccctggctaaagcagtattagccaaataggtttgtttcacagtgagtcttaatacttctagagagttagaaccatgatagttgccaactttatcttcttgcttagtacatgaagtaaaattgataaaatgtgttctatgtatgtgcagacatcttaagacttgttttaatgctagtaggcaatttagaagtcaagtttagccttaagtaaaatgttatgtaagcttttcactacaaatcactgtcatagtgggagctggcaaaaaaataaatatatatatatattggacttatcacaaaatggttttagaactaagcgtggcatggtggctcactttaatcccagcctccttggaggcagaaaccacaagacttctgtaaagttgaggctcgcctggtctaaatactaggttctagagcagccaaaactacagagcacacatgtctcaaaaaaacaaaagaattctttagttttagagtttagtcactgccatgattatcaccctataaattctagagttattaaaacgaactggaggaaatctaaaacaaggtggccccgagctggctacgaggagactgcctctgaccctagtacacgaggtagagagacacctgagctcctaacagcaagtttttccttccacagggtcatagttcagtttcttcaaaatatggttcagtcttaaaacttgacaataagaaaaggtgctgattttcagttttattcggtgtctgctaggtcttagggacagaagactgatttcttggtacacatcacagcagttacaagacaagtggaaaattgagtcaaacagaacccgagagttccagggcccaggactcctgaaacgtccttcagtatgcctccaacttgttccatttggaagtgttgcctgctgtgagataacagtggtcacttgagccttagggaccaccttttctaccaagtatagaacacggctgacaggccatatttcaagatgaaatgaccaaacaacctgcagcaaacagcattgatttatatttacactatcatcaacgtttagaatgcttcaaaaccactggaccaggcatttttagttggcaagttttttgtacttgttaagaggcatattggattttgtcatacgagagttaacccctgtcaggttgtccccgtgtttttaaaattgtgtatgcaggcttggatgccgtggtccatataaaagttaaaccatgaaagactaacttagtggggtcatttctttctgcttttatgtaggttccaggggttaaaaaacctttattcactgggtcaactcccagcattgttttgagacagggtccttagctgcagctagcccagactgctgtaaggctcaggctgaacttgctcatcttccacactgctagggtttacatgcgtgtgccaccacgctgcttttgcaccccttaatagtcaagtatttgctcagttctaattatcttgacacgtgcatccgtacgagtcggtgattccttcctactcaggactctgatcagtgtaggaactagcagacttgttttaaggagacaacataaatctctggccatgagagcactccaatgggcagcacagactagccactgggccacatttggatattgaaaaatgccatctcctcataaccctgatgacttctttcctttctaaggctggaggtgtacagtaggaaaggctagcaccatcaactaacaagcataagaccctttctatcacagtattgattaagtagggagaccttaataggcagccaatggttccctgccctgctgtccaatgtgtttccctgtctcgacaccctggttcccaagagggaaatcacaaatccatccagttcagacttttacttgctgattaaaaccagggacctttgtaatacaggtgaatacaatcctggctcagctcctgaatgctcgaattacaaatgtgaaccaatacacctgtctagaagctcgggtggggtggggtggggggaatgtcgaacctgggagtacctccctccacctgacctttcctttctgggacatggtctcttgctaaatgtggttactctgttggccagcaaaaactccagaaatctgtcttcacatcctccatgcaagggctctggacttgcaaacactctaccaactgccttttccctgtaggtccagctgtgattgggtgttgtactgctggctcacgtccttacattaatatctattcaatgccattatttctaaagtttgtaacctgaaaaccctgggtagagctgccgaatgaatgaattcctaacaccgagtgctatcaaattgaaccagaaatctgttatcagatgtaccgatttcctgtaagaccatacaaggactcagattctgtggaggtgtcaataaagacatgctaattttttaagactgaagatcttactacatattttccatttaaaatacactttaaaatagtgatggtgcatgctaataaaccagcacaagtgggtagaggcagaataatcggagttctagtgattgactgtataatgagttcaggaccagccttgtttgcaaaacactaacacatttctcttcatattaagattaaacttaagagctgcactctggtttcttttcagattctatgtcttttactccgtagactttaggggatatggatgtagctcagtaaggattacttgcctagcatgtgcaggccctgggttcaacccctaaatgtccatgagtttggttctaaaggatctacagttctgttgctggggctacggagatggcttagcactggctgttcttgcataggagcctggtttaatccccagcacccatggggcagctcacagctgtaactcctgtcccatacatgcaagcaaatcacttaagatgcattaaaaacagaaaagttctgctgctcttccatctaatgagacttctagcaggagtgtctataatcagaaaaggcgtggcagaatactgctggggacatggtcactggataatgactgaggttgctatggggtcacatcctgctcagcgcatcacagcctcaatgctggtgtcagcaggtaaatgaaattagtaaatgaaattgaaaaagcttctaaaagctaattgctaagtccacccagtcagcattattgagcattactaatggctgcatccattgacactcctttatttgacctcatagaattggccgttccagctttgttcaaatggtgcatacctctaatcccagctatttccaaggctgaggcagaaggacctagtgtgaggagtttgaagccagcctgggctacatagacccaatacaaagtggaacaaatgatggcgatccctagcattctttcctgtagtgttcctttcagttatagtgaccacagtggttaatctttgacttctccccgacctcttgtcagagctcctgagtatttagatggcaccacatctaaatgtcatttggtgcgcacaggatcctctggcatactccctacttaagtaatggctccttagttgctactggacattgtttgactccattacagtgaactgatagttacacggcaaggccacttagaaagatgaactactttgggctggggaatgtggctcagttgctggaatgctggcctagcgcatgcagagccctgggtttgatttcctatgccaggtaaacccaagcaccattgtgcacagctgtaatcccagcactgaaccggaggcaggcgggctgtgtagcaaggtggaagccaccctgtgcccagctggatcagcacgtgtgtgtctctcacaactacaacgggaagaacatttcaggagtgccccacaccatgttcttttagttggaaccttcagtaattcttccttgagctacgtgaagtagaaatctactttcttggagctcccactcagtaaccctccctcccatctccagaagtcgccattggaagggatgcgctctcccgtgttcagtagtggactcgggaggaggtataatggatctgagccatgcttggtgccttagcagttgatcatgcctaggaaagagtccactttctgtgtgagaaccccatgttgcctgttcttggaatgatttaggcatcactttgagcctaagagttgaacagttaatgtgaaagactagtgcaaacgagaggggacagagcacctagagagagctctgtaaagcaacatgtgacttggctgtacttggttggcgcttggagaagccatcttaaccttatgttaaacttgcaacgtggaatcaatgtatatgtgctttaagaatttcataatttggtttaatgcagcatattttaatacatgtttaattactaaattccttccagaagatatattgcagaagatgaaaggctttcttctttaattgcatttcagatcagtatctaaaggaaatgagaaatacttttatctttcttattaaattcttatgaaaccaaatctcaaagtctcaagcctttttctttcgttcttttttccttttctttcggtttttcgtttgtttttgttttgctttttttttcctttttgagacaggttgtcctatgtcgctattcctgactgtcctgaactcactatgtagaccaagctgacctcaaactcagagatctgcctgcctctgccttccaagtactgatgtgaaggccgccatgcctgagtctcaagctgtttcttcctgggcttcttttgttctttttatacagtacatgcacacttgtgtgtgtgtgtgtgtgtgtatgcgcacgcaagatgtgcaagatgcacacatatgcatgacagaatgcttgtaagcacctgttgcatcagtgtcctgctctgtcactttccaccctattctcttgagataggtctctccccaaacctagaccaaggctgccaggcagcaatgatgtccccacacccagcactgctgggattacaaatacatagattcatgcctgaccttttatgtgggtgttggggtttcaaacataggaccttttgtttgcacagcaagaattcatccagttggcatgtccccagccttgtttttgttttttgttttttgttttttgtctttgtttttgtttttttgaggtctcacagagctaaggtttgccttgaacttgctgtttctgaagaactgttaattttttactttttttttttttttttaagatgtctgtctggtgggagaatggcagcaggcctgtttttatagccaatcctgacatttattgctcaatagcatatttctgaatttcaaccttcaaatatatgagtcaagttgagcttggtggcacatatctgaaaccccagcattcaggaatcctgaggcaagagaaccttaagtctgaggccagccttgggctacatgagaagaacctagatagatagatagatagatagatagatagatagatagatagatcgatggttagataggtaggtaggtagatagatcatagatagatagatagatagatagatagatagatagatagatagagaaaccccatggtaatagtttccccaaatgtacttcccaaggtttattgcacaccatttgaaagagactaccacagacttcatctttctcttgttgaagaatccaagactaggagaaaatccacggcgatgcaaagcagctgcgggactgtgtgtcagagcgctgaggccgccacgccatttgcagtggctctgacaggagcagggttggactccagcctctccctcactgagacagcagtggagttgaaggtcctgtgtgcttttctcctggtcctgccactccctgtttcgagttctacgtaagccgccatttcttcagaatatggttgcttttgtttgctttcttttatggctgtgagatgcattcagcctacgtctcggcatgccaggcacacatgcagagttttgtattagcatcatgactgtatacctcaaaatggctactggtggaaatgagcacaaataatgtaggcaagcagaaaataaataaatatgcataaagctgacttattactgaaaaagtctgttccctacatatatactgacagtaacttgaagaaattcagatttgatgttccaagtatatgatatagtaatatatatagccatttagtaatatcctgctgtactggctagttttgtgtcaacttgacacagctggagttaccacagagaaaggagcttcagttgaggaaatgcctccatgagatccaactgtcaggcattttctcaattagtgatcaagggggaaaggccccttgtgggcgggaccatctctgggctggtagtcttggttctataagagagcaggctgagcaagccaggggaagcaagccagtaaagaacatccctccatagcctctgcatcagctcctgctccctgacctgcttgagttccagtcctgacttcctttggtgatgaacagcagcatggaagtgtaagccgaataaaccctttcctctccaacttgcttcttggtcatgatgtttgtgcaggaatagaacccctgactaagacacctgccttttaagaagtcctatttaaactagcctggaactgagtactagctcaggatgtactcgtactcacagaagtcttgtcttaatctcatgagtatgtgattaacagggttgggtcacagtacccagttgctgtcctgattttgtgtgtgtgtctggggtgctggcgatcaaacagagccttgtgcaggcgaggagagctctcgatgtcccaatttctttacctaccacgaccactactattcactattaataatagtcactggacttctattagccttgtagccgtccctccctgagattttactcattcactactaggcgtggttgcatttgcacgggccaggtgcatgtgtggacgtggttgcatttgcacgggccaggtgcatgtgtggacgtggttgcatttgcacgggccaggttcatgtgtgggcgaggttgcatttgcacgggccaggtgcatgtgtggacgtggttgcatttgcacgggccaggtgcatgtgtgggcgaggttgcatttgcacgggccaggtgcatgtgtggacgtggttgcatttgcacgggccaggttcatgtgtgggcgaggttgcatttgcacgggccaggtgcatgtgtggacgtggttgcatttgcacgggccaggtgcatgtgtggacgtggttgcatttgcacgggccaggtgcatgtgtggaggtcagctctctccttccaccttcctgtgtgtttcagggaccaaagctcaagttgacaggcgtgcagagcgggcgcttctcctgctgaggcatctcactgtgcaaccaactcttgaggggaagagtcaggcacttgcagaagagggccccacgggagggcaaggtgaatgagacatgcagtgactccgacgtcaccaagctgggttacagtgtgtggccgagcagtcacggggcattttcttttctcagggctttgagatgagctggatcctgcatttcatgcttcatgttggaatcacatacattgataaaaggctttggttggggaactttcttgggtcaccctgtttgtcaccctgttttctgaaatcattcatgagagcacatggctctctccatgctgagaatcaaacgtagagccttatttaccctggatactttgggtctcagctacactttcaacgcctgattcatctttattattattgcagtgggagggacagttaggtttggtattgggtttgttttgtttgtttgtttgttttgtttgttttgttttgagacaggctttctctttagtcctggctcttctgactaggctggccttgaactcagagatctgtctgcctctgcctccctatatatatcttactgtctttattggcaaaattccttctgggggatgattgattatgggacatcatggtgtcagtatctagcattcaaaaacctcttttgagatttttatttttattttatgggggtttgcctataatatgtatgtctgactgtgtatccttcagtgctcacagagaccagcagagggggtcagatgccctggaacaggagttaacaactagttgtgagctgccatgtgggtgctgacaaccaaatctaagtcctttagaagagcagcaagctatctctcggctgcccatgctcttccctgctgagccttctatagctctggcattggcattttagagccgaacaagatcacaaggtttattttttaaccacaagcacaaggagcaaagcttaactttatattaaagaaaaaactaaagcaattgaaactaaaaactaacctactgaggcttatcattagtaattttaaggtatttctcccagggattaatatgtagcatatgtttaaggcctttgtaattcagggatgaaggctacccaaagatttctaagaaagtaatcgtttcctgactgtctctcttcactggaaatctattgaggaaaaccctgaaaagaagattcgaacacagagtttctgacttgtaaatgttatctgggaggtttctaaataagtcacggttagatatgagctggctttacttgtgctaagcaggtctattgggtgactaactgaaaaatgttttctttcattgtgagaattatgagaaatatgattatgagaatactgttgctggcaattgtatttctttagccctaatagaaacattttattttccatcagtaaatattgatctaaatttatatgtatgtaccttgtcttttacagtgtctatacaaatacattttgtaagtaatctacataaggtatttataatgtgacttttgtttgagcgggacctcattcctaaccatggctggcctggagctgtggtctcttgtctctagagatcaggcatttccaacaagagatgccaccctggtgctccgggggtcttagttttgggagggagcgttttctttggtcttgtttttgcttttaagacagcatcttatatatctcagacaggcctcagacttgctgaagacgaccttgatctctgcagccctgtttaccacaggcctgtgccaccacacctgaagttttaaagtttatacat

SEQ ID NO: 48 - DNA, 6452 bp, Mus musculus
  misc_feature (1)...(6452): n = A,T,C or G
gccggcgcggccgccgccgaggacgtcaaggagttgctgctgctccctcaggacacgggcggcccctccttgctgggcggcggcgcggggggccccctgctagcggaaaggaaccgtcggactctggccttccgcgggggaggcggcgggggtctcggcaacaatggcagcagccgcggccgcccggagacctcggcgtggcccctcaggcatttcaatgggcgagggccggcggccgtggatccggagctggacgcgctggaggggaaggagtggatgcaggacggggcgtccctgagctacagcaccgaggaggagggggcgagcccgggcgatggcagtggggcggaaggcggcagctgcagcagcagcaggcggtcgggcggcgatggtggggacgaagcggagggcagcggtgtgggagctggcgaaggagagactgtccagcacttcccgctcgcgaggcccaagtccctcttgcagaagctccagtgctccttccagacctcttggctcaaggacttcccttggctgcggtactccaaggataccggccttatgttctgcggatggtgccaaaagatccccgaggatgggggcggcgtggaccttacccaggtggggcatgatgagctttcgcgagggacccgcaactacaagaaaaccctgctcctgaggcaccacgtctccaccgaacacaaactccacgaagccaacgcccaggagtcagaaataccatcagaggaggggtactgtgactttaatagcaggccaaatgagaactcttattgctatcaacttcttcgacaactagatgaacagagaaagaaagatattctttgtgatgtcagcattgtggtgagcgggaaaatctttaaagctcataagaacatcctggttgcaggcagccgtttctttaagactttatattgtgtttcaaacaaagaaagccctaaccaaaacaatactacccacttagatattgctgcagttcaaggtttttcagtcatcttggacttcctgtattctgggaacctggtgctcacaagccaaaacgccattgaagtgatgacagtggctagctaccttcaaatgagtgaagtcgttcaaacttgcaggaatttcattaaagatgccttaaatatcagcattaaatcggaagctccggagtctgtggttgtggactataacaataggaagccagttagcagggacagcctgccttcatcctcacgggaacagaagatcgccagcttctgggcaacgcggaacctgaccaacttggcaagtaatataaaaactgaaaacgaaggctgtgatgtcgacgagggccaagtagaaaactaccagatgaatgacagtaactggatccgggatggctctcctgaattggctgaaaatgaatctcaaggtaaaacaaaagtgtttatttggaataatatgacctctcaagagactggcaaagcaaggaggaaaaaccaaactacaaagagatttgtttataatataccgcctaacagtgagacaaaggtagaagattgctcagtgatgcagccccctgctgcctacccagaagaaagcaaggccttactcatcaaggaagagccagatttggatggtgcactactctcagggcctgatggtgataggaccatgaacacaaatttattggctgaagcctgcagtggtcaagatgctggggatgctggtgactcatctctaatcatgaacaagttgaaatgccctcattgtagctatgtagccaaatacaggcgaacactaaaaaggcacttgctcattcattctggagtaagatcatttaagtgtgaaatttgtggaaagatgtttactagaagagaacacgtaaaaagacattccctggtacataaaaaggataaaaaatacaaatgcatggtgtgtaagaagatcttcatgttagcagccagtgttggaataaaacatggttctcgacgctacggagtatgcatggactgtgtagataagtcacagccaggaggacaagaagttgtaaatcagggacaagatacagagttccctcgggatgaagagtacgaggaaaacgaaggtggcgagcccgatgaggagctggctgaagacggacaagatgaaaacgatgcacctcgatgggatgagtcaggaggcgtttatgtctctggatgattagctgacctactatgttcctcaagaatgctgcattggacatactatgaatcgacaattcggattgttgaacttgaaggcttgcaaaatatggtacatgctggatggtagttttgttgctgtgaaaaactgtagggttaaagccttatagcaaaaaagaatttttttatatttgcacaggactatacagcaaacaaccatgtggttggatacatggagtcctcacatatttcagtcagttgtcaaagtaaactattttttatttataggatatacagttaactatttgggttgtatgaaaatatagtccttgtcctttacagagcttgcttacattcatgtgccatttaacatgaatgaggaaatccatttatggaagtacaatgacagtgacccaatcgctctgccaatcaaaccactcaggctagtttgtactagtagagttttgtttctatttttattttattaattttattttttttaatacagattttcagtgaggggctttttcaaccccattggttctattttcttgtattttttttttcattttatttgcttcataacttaaaccaagtctcctctagtcttagatattatttcttaatttcgtgctgataggcatgcttataagaactggagaggtaatttattggaatgaactgactggctccccgccctcccttccctttttgacatgaattttactacttcacagatgaagaatgatgttacaaagttaccatggtgacgctgacaaataccactaaactgattatgacttagaagtaactttctcctgctgctctgatctgatagatggttgctctatgatgtgttctgacatggggtctggtttttggggatctgttactttggcactattcttgtttgcctcttagtgtactatacctcagccttatttgaaatacagaagtctaattgaagaatagtcctaggaaaatacataaaatgatttgttttataattcatcccccatgtccagtttggttagcttgttatgcaatataagtgaagtatcaggttttttttctcctgtgcccatttttatcattaaaatgaacacaaaatgtgcattctctttttgtttcatacttaccgggatgttgagtgtttttaaattgtagctgataatatatttttccattccttaaagtcaccacaccttgatgaaatctttatagtctccatgattcagcaatctacaaaaaatactacaagtaaaatgttgagcctttattgttccattatctaaattcctcaggagtcagagttcttcacacagttgagacttagtttatgtagccaggtgacggacgactgagcggacagcagcacgctcagcagcttgtgacaggctaacgtgccgtgtgtcaggagcagagcatatatataaaaaacagagacaccatattttcaactttcttttaaatacaaattgagtatattttcctattttatatcaagtagctaaattatgacagttgtgtggagaaaccacagagctgctttgacagatacaatctttttggtgctccatctgttcaaagttgaaaagttgattttctttttgaaagagacaaacttcatcattgcctctgatttcagtagaataatggtttgatattggacagtgacttcctgcatggataaatcagagatgaagtagtcatgttacatgttgagacccacctattgccctctgactcgtatggcagtctctgcatcccttggggatggcagaagagtttcattctggtttctgtttgaaatgaagagaaccccttattctctgtgtttgaaacaaatgagtgaagtgtaattctagaaaagtccaaagtagactaagttgggcagagatattatgatgaaaaagtattttaaacgtaagatgttgtgctttgtgaatatgtaagtataacataaagatttcttccatcccacctatccccttcctttaaaataaaccatagtttacaattggtagatctgtctatatataaatatatattaaagagcaaatatatatatttaaaaaaagatcacctaaatctgctttattagacagtagctcactgttgcgtagaaactggacgtggctttacattcttaatgtgctttattttcctcaagataggaccttatcttgaaacagaatttcctttattacttaaatcatttatgtatatctggtaaattatgaccaaatttttgttagattgcacacagtaaattgaaatacacatttggtacactacggaattgttgtgcttttgtttggtttcagttggaaacaggttcgatggagatgactttattactgttaatttaaatagtctataattgtccgttgccttttatgtcgtgttgtgacagatttggctatatttttagtcatctgaaatatactttaaaaagtttgtttttaggtaatccaaaggaaaaatgtttatactcttgaatatatatttgcctcagcctatattaaagtttctttgaagtaaacactttaccagaaacagaattgacagatttttctacttgctgactgcctaagttattttgtttcatggtcttgagaattgccttttctctagacctttttttaaaagtagttttagtactaaggtatactactggacgctcctatttttttaagtatattccttttctgacagtacaacttcaggaagttgataaatctctaagaagttttgattggtctcagaaaggtaatggattgaatactcagaattttgtctgaaagtctggcagagttgtacatttggtgaagtttttcatgtaatttatattttaaataaaatatttttagagtttttaattttaatgaaggggaagaacatacactttcatattccacagtggtaatgatactatgtcataggttcagatcatgtgttattctcccagacagtttcttccatatggtctctcatttgtcaaggttcttgactcaatttttttactagacaagttgctaaattttagcaccctacaagagctctgtgtgtgtgtgtgtgtgtgtgtgtgtgtgtgtgtgtgtgtgnnnnnnnnnnnnnnnnnnnntgggggcaaatgctatttggcttaagtagagccatcctaataaagagtgagttaattcattgcagaaaactcaagcacagtaagtacacagtgcatattagttgtttaataacaaatgtgaaccaagagaagaagtaaaagctggtaggaagggataaatcagggaagtgaggggccgggacttgcaaagggccccaaggatgaggagtgggtgtgggaggcctgacaggaaggaagctctgggaaacatggagtaagagatgtagttctttggtttatgactcaaactttctggtatgcccacacttttgtgttgtctgccttactttaacctataaggtaggtgctattctattttacaaataaggaaaggctcagagagattcagacacttgcctaaatgaccgcagctttctgtggagcggggattagtcaggtctggttcgaagccctgatttcctccctgtgagatgctctgttaggagtcctgttctctttggaagttgcttttgtcacttttgactcaagcacacctcactgccatcctctgtgagtggctgggatagtttcacttaattttaaaaggatggttttacaatatgaagaagtagatagaagccccagcttgtgtgccgttcacacccggatccttaagcttaactatggtacccaatctacacagttagaactaacaggtgttttcttagtttaggatttaaagtaggattatttattttgtttcttccctatctgctgtatcccagtcttcaagtgaagttgaactaggtagtttaaaacatgttagggataagcacactttgaaagatgttttcttgccctgaatttgagggcactgggcagtaaatttggaatacactagctattgagaacaaaatttgggggttaagaaagggatgattgaggccattatgatctgggagaagcagcatcctaaacactgtaaacaactcttctgcctgctgtttgtaaaagctctctggcaagatcttttacaaagaccaattttcttttttaaatgtaatttacctacctaatatttaaatgtcctgagacatgtatgtaaacttccaaaacctgtttgtctgtgtatttagaaaatacacaagaatctttatcaaacataaaatataaacttgtgagca

SEQ ID NO: 49 - protein, 720 aa, Mus musculus
AGAAAAEDVKELLLLPQDTGGPSLLGGGAGGPLLAERNRRTLAFRGGGGGGLGNNGSSRGRPETSAWPLRHFNGRGPAAVDPELDALEGKEWMQDGASLSYSTEEEGDGDGSGAEGGSCSSSRRSGGDGGDEAEGSGVGAGEGETVQHFPLARPKSLLQKLQCSFQTSWLKDFPWLRYSKDTGLMFCGWCQKIPEDGGGVDLTQVGHDELSRGTRNYKKTLLLRHHVSTEHKLHEANAQESEIPSEEGYCDFNSRPNENSYCYQLLRQLDEQRKKDILCDVSIVVSGKIFKAHKNILVAGSRFFKTLYCVSNKESPNQNNTTHLDIAAVQGFSVILDFKGNLVLTSQNAIEVMTVASYLQMSEVVQTCRNFIKDALNISIKSEAPESVVVDYNNRKPVSRDSLPSSSREQKIASFWATRNLTNLNIKTENEGCDVDEGQVENYQMNDSNWIRDGSPELAENESQGKTKVFIWNNMTSQETGKARRKNQTTKRFVYNIPPNSETKVEDCSVMQPPAAYPEESKALLIKEEPDLDGALLSGPDGDRTMNTNLLAEACSGQDAGDAGDSSLIMNKLKCPHCSYVAKYRRTLKRHLLIHSGVRSFKCEICGKMFTRREHVKRHSLVHKKDKKYKCMVCKKIFMLAASVGIKHGSRRYGVCMDCVDKSQPGGQEVVNQGQDTEFPRDEEYEENEGGEPDEELAEDGQDENDAPRWDESGGVYVSG

SEQ ID NO: 50 - DNA, 41498 bp, Homo sapiens
tttgtttttttgagacagtgactctattgcccaggctggagtgcagtggtgagataaaggctcactgcagcctcctgggctcaggcatcctcccgagtagctagaactacaggtgcgcgccaccattcctggctaatttttaagttttttgttgaaacgggagtctcgctatgttgcccaggctggtctcaaccttttgggctcaagcaattctcccaccttgacctccccaaaatgctgggattacaggtgtgagccactgagcctggccgttattactcattttgatcaccaatcagttctcctttttataccttcagagactttgtggccatcaggttctttgaacattctgagcctatttctcatacatgcagtttttctcagcttcacaaagacactcttaatatcttgtcttaaaaacatggaaatgagagttttagaattctttaggcaagaaatcactttgagtctaggagtactaaactcctattttcccaattatttctcaaagagtcccgtttctgagaggaatttggccacatcttaacacagtcatgtactgcatgacgttctcaaggatggactgcatttatgataatggtcccataagattatagcggagctgaaaaattactatcgcctggtgatagcgtaaagttgtagcgtactttgttttgtaatcccagcactttgcggggccgaggtgggtgaatcacttgaggtcaggagttcgagaccagcctgaccaacatggtgagaccctgtctgtacttagtgtagcctaagtgtacggtgctcataaaatctacagcagtgtatggtaatgtcctaggcctttcattcagtcaccactcactgactcacccagagcagcttccaggtatgccagctctgttcatggtgagtgccctataaggtgtgccatatttttactgtacctttttcatgtttagatagattagatacacaaatactattgtgttacagttgcctaaagtattccttacagtaacatagtgtacagatttgtagtctgggagcaataggcccaaccatatagcctaggtgtgtagtaggttataccatctaggtttgtgtacgctaaggcacagtgacaaaatcgatgcatctctcagatcatatccctctcgttaagtgatgcataactgtatgtcatgaaaggttactttcctctaagtaagaaaagtatctttttgttaatcccttggtagttaccaaaaagttaatccttctgttaattggaccttggttattgtggactgttcatgggaaagtcttttaaaacatgctttctgagtctgtgttttgagccttctatttccgaggtgtccctgtatttataaggatgtgagggacaattaatagtttaattttgagtaacaattgactacatcgtcagagtcaggtttaatgattagctcattcagtatctgaccatttggcccagaagactttaaaattccttaataacagtgattaccagttattcttggtttagaccactttctacctaattgtgaaattttcatagcctaaatcacacatcctgtcaactcttcctgggagaaacatgcatccaaatgtattattgttgtaaatttagttaacctttacagaaactaagtaatgaattcagaccagtgatctgattgaaatttccagttggaatatattgatgtcagtagctgagcaaacaaaagaatgtaaggcagatctatcagcctaatttgtttatggcagaaataagggcggaaggttggttggttggttacttggttggtttttaacactttaggaagaaagtctgaaagacctttcactgaggaaaaatcgattagagttgagcctgtagcccattaaattccgttgtttcttatttatatattttacattatttataatttattctttgtgttttattcagtaacagctagttcatagcccttgtgcttttcaaacttgttagcagtgtctgactgtataccttattgtgtacctaggattagcttccttctccatcttaaatttagctgtattaggttggcaaagcactggagataaaaatctgtatgttttgttaacattcattctctctgccctcaaggaacttgtagtttagtaaggagagacagacatgaccgaaaaaagacacagataacatggtagcagtatataatcagggtacattgaagaatttttttttttttgagatggggtctcacttgtcacccaggctggagtgcagtggtgtgatctgggctcactgcaacctccgcctcctgggttcaagtgattcttctgcctcaacctcctgattagctgggactacaggcacatgccaccatgctaggctaatttttgtatttctagtagagacggggtttcagtatgttggccaggatagtctctatctcctgatctcgtgatctgcccacctcggcctccgagagtgctgggattacaggcgtgagtcacgcacccggcctgaagattcttaagggagtgatcagttctacctgcaaaggttggaagaagcttgtacaactgattcttgaattttaattgcatttaattaataggtgttgaccaggatggggagggcatttaggcagtgcaattagaaacagcctaaggaggagccaggcgcagtgagtggttcatgcctgtaatcccagcactttgggaggccgaggtgggtggatcacttgaggtcaggacttcgagaccagcctggccaacatggtgaaaccccgtctctactgaaaatacaaaaataagccaggcgtggtggcaggtgcctgtaatcccagctacttgggaggctgaggcaggagaatcacttgaacctagcaggcaccccactgcactccaactggggcgacaagcaagactgtgcctcaaaacgcgcgcgcgcgcacacacacacacacacacacacacacacacagcctgaggaaagtgaagaatggtatcttagagaagggagagtttggttgctgtgcaggatgaaaaatcaagtttgaatagatagactggaggtcatggaggatctcttgtcatgctgaaaacattaaattttattgtcttaacaaatgggcaacaatagcagttttaagcaggggagaatcattatcaaatgtgtatgtgtttcaatctagaggcacctgcgtagtgtgtatgtgggtttagagtttgaggagagaactggttggcaggatgttataataacctgaataggccgggcgcggtggctcaggcctgtaatcccagcacttcgggaggccgagggggatggatcatctgaggtcgggagttcgagaccaacctgaccaacatggagaaaccccgtctctaatttaaaaacaaaacaaaaaaaaaaaaccgagccgggcgtggtggcgcatgcctgtaatcccagctactcgggaggctgaggcaggagaatcgcttcaacgcagaaggcagaggttgtggtgagccgagatcgcgcccttgtgcttggacaacaagagcgaaacttcgtctcaaaaataaaaaataaaaaataacctgaataaccatcgtctgtctgctccctaacactcacaggattagaatttctggggatagtacttaagctaccaaagaggatgccatcactcagagatatagaggtgatcagaaaactgcaaaagagaccttcttgtctttttctctaccaactgttatgatttgtcattgccactagcatgtatttggcaaaacttgctatggccttgtttgtcttccttctataaaatgaatttgttctaaaatttggaaatagaaattactgtttttgttctttcagtatattccagtgggttgctgcagagtaatatttttatgttttcaatgcttttagtttacacttaaatgtttgtgttggaaatgtcttttctgctaattcagttattggaaaagggctgtaattgagtagggtagtaaatactaattgcttgtttctttaactgaataacattttcctattgttaacggattgactacaggtgtgctgtttgactttctattacttgtaactgaagttagcctctcttcctctacccccgcaaaagtgtaggagactgggtgatggtcttgtattctctacaagttggtggcgttgtttaggccccaagctggaatgctgatgaccctatgattctctccctccaccctttacatctgttttatcatgcaagttctgatgatttttagactatttttctaggctctgcttcacacctcattgacacctatcttccctaattaaggtcttttttttctggcatgtatgttgccctattaacagtagctttccagagggtacatggctcacacctgtaaacttagcactctgggaggccaaagcaggaggattgcttgagcccaggagtttgagacaagcctgggcaacacagggagactcttatctctacaaaaatttaaaaaaataaaataactgggcgtggtggcacacatcttatagtcccagctacttgggagactgagacaggaggatcccttgaacccaggaggttgagggtacaataagccatgatctaaccactgcactccagcctgggtgacagagtgacactgtctcaaaaaaaaaaaaaaaaaaaggaaaaatagctttccaactgatcacagtatctgcagtcttcattccctgataataaatctccaccttgctgccataggcatctctcctctttgctatttcgattatatcactgcttctgaaaactctgtaaggtgcctatagcaatggttctaatatttgggagggagaaggggattcaaatctctctctctctttttttttttttttaaggagatagggtttctctatgttgactgggctggtcttgaactcctggctaccagccatcctgtcgccttccaaagtgctgagattacatggcgctcttgtcaaaatggatggacatttacctctgaaatgtgcccaagtgcatatttgcattccgtagggctttttagaaaatcacattgaagttcttttacaaatcttaacttttgaggatgctatagaccatcttatgtttttttaaaatgctgggtttttgttttgttgttttttttttttttaaatgccgtcgcatttacttgaagtgctcatccacccatcccactcttggatcctttaaagctctgctcaggtcttgtttcttcgaaaaagcatccccacactttaaaaacaaaaaactggattagatacacatgctttctgctcttataacaccttaagagtcttacccactaacagtaacttcaaattagcaactgaatcattttgcttcctagtgtagaccctggccaaagtaggtattcatttaatgtttattaaataaatatgtaaagttaggacttttcaagcattttcctttgagtaaaatatttactattttgtagcctatgttctggaaatattgaacatctagataataggttataaggattttaactaactggacacttacctatattttctaaattttggaagacttgatattgaggtctcatccagactaaagttttactaaatggcatctttacaaataaaaaaattcaagatttcatatttagctctgaatgtctgtttctttaaaatctccttgtttagccagtttagactaatgtctgagctaattgtgttttcctttttgggagagaggttagaaaaggtcactacatttgaaaagaccagttgtggaaatagtaattttttttaacttatcagtgatatctgatgttatcagtatactaaaagtggacatagaacgttaaagaaggaaccaaagaggcaaagatacctggagttattagggacctattttgagattttgtctctggcactaagaatttattaatttattgagtttagcaaatgatattggcagtttattttagtgctttgtgcttatttagctctttaacccaaatcctctaataatgatctccttagagagtacacatactcttggaaatgattcattttttttgaaggtcatatttatttatgtggtttcttttttttttttttttgaagggcatatttaatagctgctgcaaacatatggaatagtgctttaatcagtggtgaacaagaaattgctgttgttggttataaaaacaagggacattaatgttcttgttcttgtaccatagtaatgagaaaaaaaaatagtggttgaatggtgtttaatttgtacagtttgtgtcaaagtagaatgggcagatattttggtggataggcttttgtcttagttataaaaattaggacatttggtatgataaaggcagagaatcttaacaattggcactggcccagaaaattcagggtgcagtgaccatagcgtgttatgactgctacagtaggcatagccacctcctgaagtgttttcaactgcttgatatacggactttaggcagttcttgacttgtacatgctaattcactgcttccacaaacagttcatagatatatgctgccagatatttagtgttgaaaacttttgcttcttccaaatattcatacaatattcatgcttttactataatatatagtagattgaacactgaaccaaatgagcttgggttcaggtacagcttgtgtaacaaagcttttagtgttgggcctgtatcaaagcaagattcttcccccttatttgtaatttctatagagagcataggcaaattaataaaatttactcagtctcaaaagggaaaccaagtaaacagaatgatgcttttgtggaaagttacactgtccaagtaattgttacaggtgtttttagtatcattctttacattttcacacaagtcctaaattgttcattcctctttgctacatgatacgaaatttcacaacatactggttttttttttcttttaaccaaatatttgcagtaatccaatacaacatactggtttaatacaagagcttaggttaaataagtctcattattaccttatttcctttctccagttccccaaaaacaaaaataagggtattactcatgaatggacttgttttgattcctctatccgtgacttaacagtttttgcagaattggatcttttggtaggaggagaaaatagctaatttagagcatggaacattattatatggtgggggggggcatgggtgggagttttttggtataagggctttatgcacttggcacaagaagggtatgggaaggttgccaaggatcagtcaaaaatgaggaaatttctctactttgtgtgcttcattctgtagtgatcatatactccagattcgtagagtttttcatactattccattttcacagtgaaacagttgaagtgtgtcctggaatctttttttttttttttttttttttgagacaggtctcagtctgttgcccagactggagtgcagtggcatgatcttggctcaccacaacctctgcctcagcctcccaagtagctgacattacaggcgtgccccactactgcccagctaatgtttgtatttttagtagagacggggtttcaccacattggccaggctggtcttgaactcctgacctcaaatgatctacccacctcagcctttcagtgctgggattacaggcgtgagccaccatgcctggccatgtcctggaatattatttgggttctttcagttgacttctcatacctgggagcagcactataatttttagatggactgggttagtttcagagaattgagatgacagcgtctgtggcctcctgtgacatgcacccaagtaaagctaaaatttttatgatttagccatgcacatgattgcattaagtcatgtttcgtgattgtttagggatccaccatttaggatattgtttgtgagactacttttgcagtctcgtcatctctacaccactaactctcttctaagcatgtcagtactttgagcctgtttacactctagtgtttatttctccatgtttttctccatgctcgtaaaatcatagatccatacatatgtgtatatattttattattttatagaaatggtctatgtttaacttaatattttgtgccaaagaattgacacttgaataaggtcagtattttcagttatcttttctactagaaatggtctaagcaatttttctcttgggaaagagatgattacttcatttgtttagcaaagtgtggcaggcactaatcaaagtgctggagggatattcagctctgccttgagggagcttacccacctagtcactgtatgaggaaagtcataaagttttaactaacatttgtaatactgacttatcgtttaaggaaaaggctcagggatagtgactttccaaggacacgcagttaatggctgatacagacagcattctgaattctggatcatacttttattcttacgattatatcacataattttaattgtgacgccaagtagaactataatgaatacctgtatgataagaagcaaaatttataaacatttagaattttgaattcaggaattttaatttaccttacagtttatagtacttatgaccctaaagagataaagcgttttgaaagttgataggaaattatataactagatattcctatagttgaagcaaattttccccttagggtcttacctttatctctagttagatttaattaacttcattgacctaaactgtttgattttaatgtttgccaagacttaaaatttacctttttattaatggtagatagggtgatatgcctagcataaaatataacttggatattttaagttcaatcgggggagactgttgcttttctatagagataaagcaaacatttaattcctataagagaaagtttcttttcttaagaaaataattgctctttttaattttaattttaagaaattctcaattcatgttcttagcttatatttgaaacatataacatgatgaatgttatttttaaaatgaaaccctgctgatcttcagtcagatgtgtttgatttttttcttttttaataatagcagtgggttgcaccaccactgttcactccatttcttgattactcacaaattaatatatttgattatcgctttttaaaaacttgataattgttttccttggtttgggagtttttaaaaaagtcaataaagtttaatattaatgttttttatccaattacaggagtcagaaataccatcagaggaggggtactgtgactttaatagtaggccaaatgagaactcttattgctatcaacttctgcgacaactaaatgaacagagaaagaaaggtattctttgtgatgtcagcattgtggtaagcggaaaaatcttcaaagctcataagaacatcctggttgcaggcagccgtttctttaagactttatattgcttttcaaacaaagaaagccctaaccaaaacaatactacccacttagatattgctgcagttcaaggtttttcagtcatcttggacttcttgtattctggtaacctggtgctcacaagccaaaatgccattgaagttatgaccgtggccagctatcttcaaatgagtgaagttgttcaaacttgccgaaatttcattaaagatgccttaaatataagcattaaatcagaagctccagagtctgtagttgtggactataataatagaaaaccagttaatagagatggtctgtcttcatcacgggatcaaaaaattgccagtttttgggcaacacggaatcttaccaatttggcaagtaatgtaaagattgaaaatgatggttgtaatgtcgacgagggccaaatagaaaactaccaaatgaatgacagtagttgggtccaggatggatctcctgaaatggctgaaaatgaatctgaaggtcaaacaaaagtgtttatttggaataatatgggctcccagggaattcaagagactggcaaaacaaggaggaaaaaccaaactacaaaaagatttatttataatattccacctaataatgaaacgaatttagaagattgctcagtaatgcagccacctgttgcctatccagaagaaaatacactactcatcaaggaagaaccaggtaaatattatctatacaaggatacttccttgttcatcctaattctagttggatataatcttgaagtatatttttaattgaattattttagttataaagtaatactaaagttgtttacaaaagaagggggaacgtcattcaaatgcataacatatttggtatattttctttgtcttttttcaacacatatatatgtgggtttatcaaaagatgtattaatagccaggtattgcatatattgtcaaggaacgtggactctgctgcatgtacgggtctttgactttcctcatttttagcctctgtgctcactattttatacccagtgttgggaaagatagaatctttagttgtaatatataatcactgtcgtttcagagacccccttaaccttttttattttatttttggctgttaaaacatatttaagtgtttcaaagaattttgccaattatgagattatggtattctagtttgtttagggctactgttcttctgttattttttgtttatttatttttttgagtcggagtctcactctatagcccaggctggagtctcactgcaaactccgcctcccaggttcaaacgattctcctgcctcagcctcctgagtagctgggactgcaggtgcgtgccaccacacccagctaattttgtatttttagtagagatggggtttcaccatgttgtccaggctggtatggaacccctgacctcaggtgatctgcttgcctcggcctcccaaagtgctgggattacagacatgagccaccacacctggcctagagcaggtactgttctgttctcaccatagaagctattttgtttgtccactgtcacctgattttcattcacctttgcattcattgcaaagcctctgaggcctttctcttcaatatatttctctccaaaagttccgtaggaatcttagagaatcacatttacagtgggaatttttttaaaacgagaagaccattgttaagtctttagtttaatctggctgtgcatatctttatttgaagaagctcagtgggtttgaggtttcctatgcatgcctgaggcttgtccaccactgtcatacattatttaatgcttgtttttttcacttcaaagcactgtaactgttcagtgtctgatttatacgatggtggtcatctgaggatggagtattttctgttaaaggaatcactgtttttagttgccagagggcaaaatgccatagtaatcctgtgaaatgttcctctggctttttagatttgggttagctttcagtgataggaattttgtgtatgtatgtgtgtgtgtgtgtgtgaaatttttactgtgtgaaaaatcaagtgtgtatatataacgaatactatatatctttttccttgtactttatatcaagttttaacaataaaatccctgagacaatttagttaaatgaagtattaagggtagatagactccttagctagcactttgttttgtcttaatgtagaagaccttgacagatttctcattagagctacgttgtctttgtgctgtatggattatttctgtttaacagtatggtgggaaccctgtagtgtttttaaatacacacacttttccttaaaggaataaataacatcttttgggtgtagcggttgtttgatggtaactagtcagcagtaacctcatttaaaaaattaatgccacatataattggagtgatttaaagaaaagcattaataatgaaccacaatgcatactttcaaagatgacattactagcaatttttatcaagtatctcctagccatggttgtgttaatggactagttctattataaattaattggtggtctaatatgctttatctcttacatctgttttgtttgtttgtttttaaacggagtctcactctgttgcccaggctggagtgcagtggcacagtcttggttcactgcaaccactgcctcctgggttcaagcgattctcctacctcagcctcccaagtagctgggattacaggcacatgccaccacacctggctaatttttttattattactagagacgggggtctcaccatgttggccaagctggtctcgaactcgtgacctcaagtccacccaccttggcctcccaacatgttgggattacatgggtgagccaccgtgcccagccgtctcttaaaaaggattattttcatttcattgataccagtttggtatccgaaccttgcttaactcacaaatttggttctatccatgccaccagtgttatttggtggaaaaaataaatgggtctcaaaagagcattatggttagggtatataatatgatatagaaccaaggactggtaaatttttactgtaaagggctaaaacagtaaaaaaaaaaaagactttcacctttgttggtcataaaagtcagctcatcaactctgccacttgtgacatgaaagcagtcatttgtactatgtaaacaaatgaaggtaggtgtgttccagtaaaacttgccaacccttcgtatatagcagtggttcttaatcatgggtatgcacgttggtatcacttgggagcattacatgccgtaaagggtctctcttctgtggattccaatttaattggtatggaatgtggtttggatgtggaattttttttaaagttctacaggtaattttatgagttaaggctgagatcagcaaatattactatattggaaagagcctaaattgagtcaaacataatgaatttaaaatttaaaaataagctgtgccacctaccccctgtagtccatgatcaaattaagctcttgtcctcagtttcctcattaaaatattgtgttgattttatagaattattatgaaaatgaagtgacaaatatgaaataactcttggtcatggcaatcctccttaaacttggaaaagactattgaggttattcatatcagttttccggtgctgtgtactttctaccaaatgccagatagatggtcttagcctcagcttgattttttgactgcttgtaaagacttccctaagcagcttccagtgtaggatgactgattattaggtagtcattttaaatgtagccaaaatttgcttctctataacttcctaattctgtcgttgggaatagtgtaatttattatttatttatttatttatttatttatgttttttgagagacagagtctccctgtgtcaccaaggctggagtgcagttgcatgattttggctcactgaaacctccgcctcccagattcaagcgttctcctgcctcagcttcccaggtagctgggactactggcgtgcaccactgcacccagctaatttttgtattttgtatttttagtagagggtttcactatatgttggccaggctggtctcaaaaactcctgaccacaagtgatctgcccactttggcctcccaaagtgctgggaatacaggcgtgagccactgcgctctgcctggaatagtataatttaaacctaacctaattcctctaatctacctgataacccttcaaatgttagacgtttaaagagtcctgtttttgtaggctatgtgctcttctgcccatcttgtgatgaatacacacaatttactctttccaggcaagttctgaccaatatagaacatagcctgtgtttaccaacgttaaggccttcccaaggtcattcagctagtaagagtagaaagaggcaggttgcatatttaggactatgctgcatgaaaaccttgaaattaactactaaagtagtagattcctatcttttttaaaaaattagttccttttaactttaaaatatttttatgatccccttcatcattagttatgctttaatttccatttattgagaaaacagttgtccatgaaataaatgcttttaaataaatttgaagttctatagcaaacatctgaaaagtcttagtgaattgttcaatctgcaaacaatgcttggcatgtttggatttggcgggggtctcttctagttactgtgtcttccctcaggtcttcagcacagagtttgtaagatacagttctaataacgctgtcttgtataatgttgaagcttttgtttgggtgccttttaaagattgagataagaaggtgtacccatagctgcagggtttttattcagatggtatttttttatcttgaaattaacatatttgttgtttgactcactacagagtcatatttgttgtttgacttcacttcagatcatttcttttacacaagaatactttgaaggtagaactcagaaaagttagaaatttctgtcctaagagaatatgcacatactgggattatggaataattaaaactgtcagcaaaaactaaaatctgggtaatcaaataagggtaaaaatgatgtcgtgagtgaattgctctgataatgtaaaaatttcaaaatccttgtcttgctgatttgcaaccaggaaacattaaattttagccaaataaagtagataacctgagattagaaattgaattacagaagtacagataactagtgcctaaatttgttttacaacgtgtattcacacatgttgtgtcccgtttaactagaacaagtcaggtgttaatctgattttttaaaatcactttattttgcgggctcatggaacatggttttctgagcctagatttttaaatttatacctgtcatactagcaacttctacctattataaataattttactctgtatgtacgttgcatgcatacataccttattttgaaatgacaaaagaaacaaattagcaaaataaagtaaaattggcaaagaagttaagagtgctcatcatggatataaatgtggttgccctaattaagcttttaattggctctaagatacaaaacagccttactcaaaagagaaaaacataccagttctaccaggatgacaaacttcctggtactgacttctgaaaggaatttctccagtgggatttttttatgtagttgacaccaagtaatataatggacagtttccttagatgttttctagtaaatgcagcagtcgattattatatttttaatctttgccacaagctgatgtagttctatgtaaatgattttttttccttatgccatacgaatactcaaatgtaaggtaattttagttgattaaaagataaagtttagaattcttttaaataacctggaagtttctttcacctagacttatgatggaaaaatagttttgcagcatttttaggtttgcgttaatccttacaagtagagttgaaatcaggtttaagctttgcacttatttgtgtaattgcttttttggtaaaaaagcatacaatttggtactttgaaaactattttgagaaaagaatatccaaactagatagatataagaaatcgtaataaggcatatatttgaggcagagtcttgctctgtcacccaggcggagtgcagtgtcatgatcatggcttacagaaacctcaacctcctgggctcatgtgattctcccgcctcactctcccgcaatcagccacacagagtacttggaactacaggtgggcgtgcaccactatgcctggctaattttttttttttttttttttttttaagtaaaggtgaagtctcgctttgttgccaaggagactggtctcaggctcaagggatcctccagcctcacttcccaaagtgctgggattacagccttgagccactgtgtccagtctaaaatatgtttcaaaaccatgggacatggctttggtgaaggagacttgggctttagattcagttttgccacaatgctagccttgagtgtatcccagacagcctccctaatgggaaagaagtaaaatttctaccttaaaattctgaaatcttaatagttctgaggacccaaagctttttcttaatcattttggcaacaaatcagctatttatatttttttacttccttaaatgtgaatattcatgggttttttttctttttttcttttttctttttttgagatagagtttcactcttgttgcccaggctggagtgcagtggcgtgatcttggctcactgcaacctcacctccagggctcaagcaattctcctgcctcagcctcccgagtagctgggattacaggcatgtgccaccatgtctggccaattttgtatttttagtagagacgagacgggtttttttcatgttggtgaggctggtcttgaactcctgacctcaggtgatccaccccccccccaacccccgcctcagcctcccaaagcgctgggattgcaggcgtgagccagcacgccctgcaaatattcatgttttattgtataaatattagtgttttgtataaatattcatgttttcattatagggtgctactccagaccccacatggggtgttacagtcatagctataaaatctgaaaaattctgcattctaaatcttaccccaagggtctcacgtaacagatttatggatctgaattagtttttattctcttaggagattccgagtgttttgctaaacctcttaggcatcctatggagtatgctatgaaggatgagatgcaagtcagaatttaatttcatttttcattagcaacttgggggggttctaataattagggggagggtgctgaaggccagatgcttacttatgtatttatttattttattttattaagagacaagatctccctctgaggccgggtgcagtggctcgcgcctgtaatcccagcactttgggaggccgaggcaggtggatcacgagggcaagagatcgagatcatcctggccaacatggtgaaaccccatctctactaaaaatacaaaaattagctgggtgtggtggcgcgcgcctgtaatcccagctactcgggaggctgaggcaggagaatcactttaacccgggaggcagaggttgcagtgagccaagaccatgccactgcactccagctgggtgacagagcgagactcagtctcaaaagaagaaaagaaaaaaaaaacagctgggcacggtggctcacgcctgtaatcccagcactttgggaggccgaggcgggtggttcacaaggtcaggagatcgagaccatcctggctaacacagtgaaaccccgtctctactaaaaatacaaaaaaaaattagccaggcatggtggcgggcacatgtagtcccagctacttggggggctgaggcaggagaatggcttgaacccgggagcagaggttgcagtgagctgagatcgcgccactgcactccagcctggggcacagagccagactccatctcaaaaaaaaaatctccctctgtcacccaggctggagtgcagtgatcatagctcactgcagcctcaaatccctgggctcaagtgatcctcctgcctcagcctcctgagtacctgggcacacctacaggcatgggccaccactcttggctaattttttttagatttttaaaatagagacagggtctcgttatgttgcccacactggtgtccagctcttgggctcaactctcctcctgcctcagcctcccagagtgctggggttgcaggcatgagccactgtacccagccctgatgcttatttttaaaaataaataatagttaatgagttatatgatatactaatgcataagaatcttcagtatttaattttaaaagatggtagtaggcaaccatatggtaggtgaaatagtagtctgccactgtttccccttttgctgtgcttactgttgctttccttccctgtatcatacttgacccaagaagtggctacactgttgattattacctgtaagttagaaactctttaagtggtcagaataaagctgaagagctgaagaagtcttatgtgggtcagttaaggcatttttgtgacttcttcctgctgaaggtgttaagttgtctaaaccatataaatgccagtccctgaaagttttttatagaactgaatttttggtttctgatacagacttaatatatagtagggtgaccagatagtgtaaattttcattcaaagctttactcttcagaaatgttataactttctgggaactccaaaatagctttccacatataataggaaatttggaaacgtttttatttaaaatctaaagacactgagcaataggccacataatgtcaagattgaggagtcccttatgcggaacttattcacaatagggtgactgtggggtagaaacatactcagtgccatgtgataaatgttaaaattagattatttaagatgcatgacggggtgcagtggaacagtcctaactgcccagaggagttgggaaagcttcatagagaaggcagtgtgagtggatcttttgttatgtaggagtttgctaggaggggaagaagagcattcgttgacttgcaagatgggaagaaattggaataagtgggtcgaagaatagaaaaggggtagtgttgtggggacatctccaatttcctactaccttgtctataggtataactagttatttttgtattgtaataaattctgacttgttttacagactctgaagtagtgagtggtttttttaactagagatttgatctgtttatattgcatttaagactaaaaagtttaagagcatttttcatggattggaggtggggcatgtactggggggacctgttagggagaaataacagcactttggaataatgcaaggaagaaacagttgagcctagtctaagtaagatggggcagtcacttgtcaatgagtttgcgagtgaaagggaagctattttgagtttaaaaggctgctacaggaactgtaaagggtggtttatataatacatttgcaactgaatttactctccactgaaaggagaaaactgaagagaaaaaatctatacctgtttatgggggggaaaagcaccaaacacatttacttttagttctgaaactgtcaccgtaagagaaacttgtgctaatatgtgtttatatgaaaatgaaagttgagtagatctgagtctgagtttttatacaacttgtttagctgtttcttaaaacttctttcccagggtcttgtctcatatcttttcaagaatatttgtgttctgagaaaatctggattagtctgcacttgcctaatggttggaatattgagaaccacaagcaaatagtcagggaaacctttccaactcagtcttgtttaatttagcattcacaggcaggtgctgtactactcacttcgcacgtgatttggaagggttgctagcccaccgtgatctaaaattcctgtcatgaccaaggcaccaagattagtcttgtctttaatgataccttgttttgtcttgtactttgctcaatattttcatttactaatatcattggtcatgggcacatttttgggaggtagagactgagatttagaccagtcttttaatcccatctcattctttttccactgttaccagattttcaaaaatctatggtaatattttcatttttttttaggagatagggtcttggtctttcacccatggagggagtgcagtggcatgatcatagcttgctgcagccttgaacttgtgggctcaagcgatcctcctaccttggcttcctcccaaagtgctgggattacagacatgagccattgtacccgtccttccatgaatagtacctctcatgaagatattatttaaaatgcaatacatggttaattagagaagtatataaatgtgaattctaaggaggagattgctttaaagtagacaaaaagtattactgtaaagagcaatgatagctagtaccttggtatccttaagattttggagaatatattgttaaataaagggaaggtaataaagtggatgctggtttaacacagagtggaattaatgtttatttttgttcatttcacaaaaagagcatatcaagtatcagtagcaaagtacgtgtgaatatacttctgcactcgtgttcccagcattgcaaattgtagttttttgattgcctgcttatgtgccaggccctgaggcttggtgcttgtgataaactgtcaggaagcaatgtaatacagttactaaatagtgcagacctctgccactagcttgttatttaacctccctcagccttagtttactcattgataaaaagttgaaagattttactgccggatgcatacaatccatttttgttataggggttgctactatctgttcactgagaaaagacatttttttaaaataggagaaatcctacatggcttgtcatttagctctggtcatttgaatattacataccactcatgtacctgccaccagtcagaaaaatagccgtcattttgtgaaaccagtgtgtgtgtgtgtgtgtgtgtgtgtgtgtgtgtgtgtgttttagacaagtgcagtagtgagaagaggggaaaggaaactaatgtttgaattagtcttcagaaaggatttctgctgtttgcaaagaaatcttagccctttttttgctacctttaaatgaagcataagattcccataggaagatgctggatatcacaaaagcaggtgtattagagtttattttgtaatcttgtaattttagagaaaaagatgatgaccaagagttgctatcatgcttcctaatgaagcaaaattcattcgtgtcaattaagtggttggttgtttggtttctattccattcacatcaacatctctaataatgagttgctaggtggtttggctggttttgaataaggtaagcagtgacgtaatatattggttcctgaaagttaagcacactattgtcaaaagattgtcaacttggaagaactcacctgtttttgagatttgtttttgatatcaagaaccacgtagttggtgcctttcaaaagagacacaagacaaatatacttgatatttattttgtaaggttttggctgaggaggtctatacttgttgtccatgtagaattagaaatcacaaattctaatataatactttagggctagggtaggagataggaaatgcctcttaagagttgaggaaagccttcaacaattcactgtagaattttgcataaatagaaacctgtatttggaaacccacttggcagaattgtaagacatgtccttgaacagactgcatttcagaataatgacttttttaaaaaaagattgagaaatctagtgaaattgaataattgtattttttatttttatttcaattttgttgagacagggtctcactcttgcccaggctgtagtatagtggtgtgattgtagctcactggagccttggactcctgggctcaagccattctcccgcctcagcctcctcagtggctaggactagcacatgcctggccaattttattttttgattattgaaatacatttaactttaagaaaacaaaaccactaaatttcaattaaatattttcagttcatgataggttttagtttaattgtagaccaaaaaaccaaattattcttcagataccatgaattaaaactaaactttgtttagtgatataagttgcaaagggcaagactattcaagccagcatttaactctaatacatatatatcccaaagtgctgggattacaggcttgaagccccaccatgcatggcaaacgatatttttaaaagccttttatttatcatgcattatgataaatactaggaaaatacctaaatagtatcctatctagctattatcctagatacctgaacagtatccccgttcttaaggattgggcaaaggagttctgtatctatttactgttatttaatgtggtaccacattaaataacatttaccacatttaatgtggtaccacattaaatacttgttcattgttctgacttccaacccatttactctaagcaataatgctacattctactaatttcaccttacagagaaaagagaagccaacagcctggtggaatatccttaagttctggctttagctctctctatgtacactgcttgtctctgctgtctctcttaagtacccagacccgtgctcctgtatcacaagactccttaggaatcttacacaatggataattccttctcttcgcagcaatatctttagtattctccctttagtgactccttcctgtcagtattcacatatgtaattttcggccgggtgctgtggttcatgcctgtaatcccagcactttgggaggccaaggcaggaggattgcttgagcccaggcattcaaggccagcctgggcaacatagtgagaccctgtctctacaaaaaattacaaaaattatccaggtgtggtggtgtgcacctgtagtcccagctatctgagaggctgaagtaggagaatcggttgaacctgggaggcagaggttgcagtgagctgagatcgtgccactgcactccagcctgggtgacagagggagaccctgtctccaaaaaaaagtaactttcagtttcttaaaaaagaaaaaaatcagtcgttaccctatttctcacacttcccttttatagctaaatttctcaaaaagattgtcagtattttttcttaattgatcatcatctcttcagaacacagaccactcttattttttctgcttgccccacctactcaccagtatcgctcagtaagattaccagtgacatcctaggtgcttattgaatgaaagtgatgtccatttttagccctcatcttgaattctagggagcattggcaaagtggactacttttcccctaaaagtcttttatatattttttgtaactcattaaatgttaggattattcagtatacttaatcttttctcactgtctcatctgtttcactcccatggttttatttgccatctatattctgtattctgacaaaaactgttttttcttttgagttggggtctcactctgtcaccccaggctggagtgcagtggtgtgatttcagctcactgtagcctctgcctcccggactcaggcggatcctcccacctcagcctcccaagtagctgggactacaggtgtgtgccaccacacttggttaatttttgtattttttgtagaggtgtggtttttccatgttgaccaggctgatctcaaactcctggcctcaagtgatctgcccacctcagcttcctaaagtgctgggattataggcctgagcccccacttccagctaagcagtctagctttaattggtctccacttctgaaccaatgtggatgcaccagcaatgttttatacatctagtacttactagttagtactagcagtattgtttgagcgtcaagtaccataattgtaacacttggcttgttatattatccaattagattcctagatcacatctacgatataggtggatgtaaattagggagaaactaaggcatatggtcacatagcctgtaacagaaacaggagtggcacctaatttaccctggttctacagcccattcctaaccagtacactgtactcactgtacatgtcttaggcttctgtgagccttgtagtattgaacacagtagataattcattacttacagatggtactttttatttaagaaacagttccaagaaagagtggtgttttgggtggtggctatggtgtggtttgtagataaatttttctatgtttccttttcagatttagatggtgctctactctcggggccagatggtgataggaatgtgaatgcaaatttattggctgaagctggcactagtcaagatggaggtgatgctggtaggtacagtaagattttagcaacagtacatttaagattgggaagtgttacatcttacctgcagcctagtgtaatttctcttccataagggggttctattgtatataactactttcaatctatggtagctatgtttatgatgactggaaaattggtaaatgcaaattgatgtttccggttttgtatgtttgacggagtcatttgtttagttttaaaaactcctacatataaaaagtaattgagttaatatggcttatggcttcctgctggtatatagatacggaacggaaatggtaattacgataatggttgaatttattttaattagtttttatgcaaaatgatggtgtagttaatggctatagaaaatgttgattagttctgtgtgatgtcagcagtgcattggaggaagcttgatgaatataaaaacaaagaatccatgagtatgttatgaataaaatagagtaaaagaaagtcattctttacagaagaatgccaagctgatagaagaatgatagaattggaaaaatagctattttgcaatccccacaggaaataattcaaagtcatcagtggatgttaagccaccgttaatgggcttgtccccctatgattgggtgaaagattgttggggaatatcatattcacatggtctcaaattattcccatggattcccatagatgatttccacttgcaaaggggaaaaggtaaatttacaataaggagatctgagaaagattgtcataactaagtgattaaacttagtgccattaaaaagagcacaaaccaaaattaagggctggctgatttgatgtgccacctggcatacaacatttcctatgcagtattcttgagaaactgtttagcttgtatctaatgacaaaggaaaacccagacattgatgtatacgacaggtagtccaaactctaaaatgttaatgttacgacagacaagtggggaaaccactagattgaaggagaccaaggaagtaaactaaagtgcagcatggatcttgattagatcatgggaacaaaaaatggctaaagaggacattttggggccaactggaaattagaatatgtagtgtgtgttaagtgatattcagttaattttaaatttcttatacggtggttatctaggagcatgttctagaagatgcatttaggcttgaagttatgagcatgcatgtttctaaatagtgcatagaaagcatgtatgtgtgtacataaaaacttgacaaaactagtatttgttgaagatagatatggatgtttattgattgtttcaattttattagctttggaattcttttcaaagttggtgagaacagagacagtgaggtacttgttactaagagtagtcgtgggctctgaattcagtatgtactgaccaaaataaaaccacatttctaaagaaactgccttaaggtggtttcccctgactgtttaaaagaatttacaaaacaagttttgaaattagcagtttgtacgtcagatgtcttgaattttaaagatttttttgctcgtacagaaagttgctaaccgcgcaagaagatgttactgcacttgctttctcagttttgaaatctagtccaagaatgggtttaattagggatatttgaattcatatgtaaaattttaaatttgtaaacctttgatatagggttattcctcttaaaggggacatttcgattcattagtatttttgcatctgagatcagcctttgcttgatgattttgatgtcaaaaacttacattgctttttccttagttttctattgtggaataatgtacccagaaggatattattgatcagtaagcaccattttgaagagatctataatgaccttaatgatccttaagtgtattgaattacaatgacagtacctttatttaggccactcttgtaattcctacaagtattctctgttataagaattaggagagatgaaagaaatttggggcaaggtttacttaatttgaattaccattttgtattccagatagagtattcattccttgttatcatggatgttgaatcttggattttcagtttacaaatggttttagggatattcttctgtctcctttttcttttgagatggggtctcactctgtcacccaggctggcctgaatctcatgggctcaagcgatcctcccacagcctctcaaattactgggatgacaggcacgagccactgtgcctggcctatttccttattcttacatgttgtgaataatatttaattgtagatactagaacatctaatgtgtcttttggtactagttttccaagtattttgagcaagtcagaagtatgtattggcatttgctagataacatttattctacaagtaattgtagggcatgtgtcttaaacaatagaaaaaccaaggcaagtaagataggcgcaggagtttgtactgatttagacaagaaatatggatcataaagctcaaactttgtttagagatgtgaaactaacagtaggttgacctccacaggctaccacttccgttccattctttatccctcacacagaaatgcttcactttaggattcttacaacttactcccaaacactaattaggtgcagctataatgagttatagttgaatttatgtagctatgggttcagggggctttctttacatcaaaaaccggtgacggtattccaagtacagcacagtttacagtaatagtaatgatgtgcagttttaaaatattttagagacatttttactttgttgggtattaagactttcaccaaaaaggaatcttaagttatcttaatttttaagagggacagcatgtctgagaacatatatgggaagtgattcttaggaaatccatttgggtaaacattctttacttttaaaaccgtgatgcccatgggaggaaaatgtattattgctgcttgagtgaactgtatcttggcaaggagtgttttaggcagaggaaagcttaagcactttgaattgggagcatgcttattatggacgaggaacagaacagaggtcagtatagttggaatagagtgactgaaaggaaagggtggttggaagccagggctccaccgggtaaagctttggaggatattgaaagtctctagcttttactgtgagggtgggtagtctttgcagccttgtaagctgagtggtgacctgacttaaggtagtgttttaaagaatctgtgatttctctgctgagaacagactctaggaaggcaacagtggaagtagggagacaagtttttggtggctactgaagacagtccaggggctagagctcatgattgattggatcagggtggcaatagttgtggaagattctggatatatattcctattgccaaaaggttcctggtccaaggaattacattaaagatggaattaaatccagtggatataattcctgtccttgctaatctgaagatccttaggcacatgtattattctattttgattctatcttctgcacgttattttatttaaggatggagttagaaagaaatttcagggaaccctgagagcattcagttaccttgccctaatatgtctgaaacaaggatctagtaatagaactttacatttttaattatcctatatatattctttattcttagtctatttttctgtaccaattaatcttaaaattatgtgcctgtcctggattcgtaataaggagaatatcccatttgatagctgggctttagggtgataaaatcttaagtgatagagtagttagaaaaagcaactattaggagttctggtttgaatatacccatcctttaaaagggtaatttcttgtggcgtctgcacaattaaatgatattcatgtttttttctcccgcccgccacctttttttttttttttttttttttttgagacatgatcccactgtgtcgccctggctggagtgcagtggcgcaatcttgaatcactgcaactcccgggctcaaatgatcttccccagtagctgggactgcaggcacacaccaccatgcccagctaatttttaaaatttttttgtagagatggagatggagtttctccatgttgcccaggctggttgcaaactcctgggctcaagtgatccttctgcctcagcctcgcaaagtgctgggattatatgcatgagccactgtgcctggcccatgattaatttttttaactgaatttcttctactatagttgaatggtattttgtttaattgtgataataaagtaggaagacatctcaattttagactaaaatacagttttatttaactcatactatgaaattctatcataatgcctgtaggatataaatataatttctgttttctgactctgatgagagacagatctttattaccattattaattcagaatttttacttgtactaggtacttcacatgatttcaagtatggtttgatgcctggtccttcaaatgatttcaagtatggattgataccaggtacttcaaatgatttcaagtatggattgataccaggtgcttcaaatgatttcaagtatggattattgccagaatcttggccaaaacaagaaacctgggaaaatggcaagtattagtcaactaaacaaatacagaattaattaaataattgttaacaattaaaagctttcatgttctgcattttttaaaaaccaagtagcagtagctccacataattgctgttctcagagatagagataagaagttttgatagcaagttttctgtttaatgtgtaataagcactttctctttttttaattctcataggtgaatcatctctaatcatgaacaagttaaaatgccctcattgtagctatgtagccaaatacagacgaacactaaaaaggcacttgctcattcacacaggagtgagatcatttagctgtgatatttgtggaaaactgtttactcgaagagaacatgtaaaaagacattccctggtaagtaactttaaatacagctgatctttgagataaactatatttatgtcagtgaagtttaaagggatttaaacagttaattgtgaatttaaggaagattgtctcctaaattgctttaaacagtttgactttatgaactgatagtgagctttttacagagaaactggtgtattcactcactattaaatgtgtggtttaatttgagtggttcaaatgcattctattatatataatatccttatattggattttttccccctccaattaggtgcataaaaaggataaaaaatacaaatgtatggtgtgtaagaagatcttcatgttagcagccagtgttggaataagacatggatctcgacgttatggtgtttgtgtagactgtgcagataaatcacagccaggagggcaagaaggtgtagatcagggacaggatacagaattccctcgggatgaagaatacgaggagaatgaagtaggagaagctgatgaagagctagttgatgatggagaagatcagaatgatccctctcgatgggatgaatcaggagaagtttgtatgtctctagatgattaactgacctactatactcctcaaggatgctgcatttggacctaatatgaatcgacaatttggattgttgaacttgaaggcttgcaaaatatggtacatgctggatagtagttatgttgctgtgaaaactgtagggtcaaagccttatagcaaaaaaaatttttttttatatttgcacaggactatacagcaaacaaccatgtggttggattacatggagtccccacatactcagtcagttatcaaagtaaaatattttttatttataggatatacagtaactatttgggtcctatgaaaatagtccttaaagagcttacattcatgtgctactttaacatgaatggagaaaatccgtttatggaagtacagtgacaattgacccaatcactctgtccatcaaaccactcaggctagtttgtactagtagagttttgtttctatttttatttttattaattttattttttttaatacagattttcagtgaggggctttttcaaccccattggttctattttcttgtatttttccatttaatttgcttcataacttaaaccaagtctcttctagtcttaggtattatttctcgattttgtgctgatgggcatgtttataagaactggagaggtaatttattggaatgaactaactgacttcctccattcccctcttcctttttgacatgaattttactacttcacaaatgaagaatgatgttatgaagttaccgtggcgaagttgacaaataccactaaaatgattatgatttagaagtaactttcttctgctgctctaatctgataaatggttactatatgatattttctgacatggtatttggttttgggtatctgttactttggcactattcttgtttgcctctttatttttgccagtgtactatacctcagtcctatttgaaagacctaattgaaagaaaaatcatagaaataagtaaaatgatttgttttataatttatccaccatgtccagtttggttagcttgttatgcaatataagtgaaatatcaggtttttacccgtgtcccttttatcatgaaaattaacacaaaatgtgcattctcttttgtttcatacttagcgggatattgattgttttgaaattatgatcaatacttaatttatttttttctgtccttgaagtcactacaccttgatacagtctttctagtagtcaccatgattcaacagtctcaaaaatcttacaaataaaattctgagaagctttattattctataaattcttcagggtacaaagggtgacatattgaggtgaaattgtcagatttacttagcctggtgacatgaattagctgattgtggaactctcagcagcatttcacgtattgttaacatgtatggcatttattagcatattgtatattatataagattgagggatgtcatattttcagctttcttttaaataaaaattgagtatattttcctattttatatcaggtaactaaattatgctagttatgtggaaaaaattgcaaagatgctttgacagatataatccctttggtgctccatctgatcaaagttgaaaagttgatgttttttaagagacaagctttatcattgtctctgatttcagtagaataatggtttattgttagacaatgatgtttctgcttggataaatcaaagataaattacagttacatggttagatgcatcttttgtcatctatattgtagtttctacataactgtaaacctgacagataagaatagtttcggtttgatttttgtttaaaacagatgagtacttcttaatgttctagacaaatgagtaaaatgtatttctggtagaaattagttgggcaaagatactatgaatgaaaaagtattttaaacgtaaaatgttctttgtgaatatgtaagtatagtataaagatttctttcatcccatttatccccttcctttaaataaactagtttacaattggtagatctgtctatatataaatatatattaaagaacaaagatatatatctaaaaatcacctaaatctgctttattagactacagttcacttattgcatagaaactggacttggctttacattcttaatgtacttttacttttcctcaagatatgaacttactctcttgaagctgaattttcttttactacttaaatcatttatgtatatctggtaaattatgaccaaatttttgttagattgcatacagtaaattgaaatacacacttggtacactacgggattgttgtgcttttgtttggttttagttggaaataaggtttgatgtagatggcttgttactgttaatttaaaatattctataattgtccattactttatgttgtgttgtgacagatttggctatatttttagtcaattgaaatatgatactttaaaagtttgtttttaggtaatccaaaggaaaagtgtttatactcttgaatatattagcctcagcctatataaaaatttctttgaagtaaacattttaccggaaacagaattgacagatttttctacttgctgactgcctaacttattttgtttcatgatctcgagggactgccttttcccatctagatcttttaaaaaaatagttttagtactaaggtatactactggacatttctatttttttaagtgtattctttttctgacttacagtaaaatttcaggaagttgatagatactaagaacttatgattggtctcagaggtaacaatgaaatactcataattttgtctgtggaactctggcagaattatgttacacatttggcgaagttgtctcttgtaatttatattttaaatgaaaaagtattttagagcttttaatgaaggggaagagtataaactttctttcatattcactctgtagttacagaccgtctcataaatcaagattgtgcattattagagttctcagagacagatacttccatatggacccctgttcatttttcttatttactagatattttgctaaatttagcacactagcaattaagagtttaaaaaagaagaaacgttataggaaagggaaactgaacagtaatgagtagctttgaaattggggaaaacacactagctgggttaggtacagctatcctaatggagaagagtgagctaaatgcgttaattcatgtaaagtgcttagaacactggtacataataggtgcataacacatcttaaagttgtttaataatagataagaaccaagaggaaaaagaaataagaaaagatgggggaaaggaaggagaaaataggaaatgaaaggattaggacttgggcatttatattaatacaaaatggtgtaaacggcctgaatatcactgtagtagtatcatacgggggaaagtgtgatggaaaataggtttaaaaatcttaatttttaaaactttagtaagctttatttatattttttaggattttctgaacatagcatgaagggtttagattcatttttctgaaaaacgattaaaaaaactaccaattttttttttgagtgcccacacttgccgttgtgctgtatacatgattttaccttaatcctctataaggtaggtgctaattgtctccattttatagatgaggaaaggctcagagaaattcagaaacttggctaatttaacacagctgtgacagagctcgaatttgaccacgtctgattctgaagcccatactctttcagggaggctctattgctgcctcattaaacaactcttgtagaatttcagctcttaatggagtctatggattatatttttcctataagacagctgtgtttagaattttgagtgtctttcctccccccaataaatttccttactactctttcttcataaagcagttgttttgtcactttgactatattaagacacatcagtgtagcacatgctcttaactggctgtggcattttaattttataaaagaatggtttttatctgaagaactagatagaaaccccagtttttgtgccgttcagtcacccagatccttaaacttaactatggtacataatatccacacttagaactaacaggtgtttagtcactttaggacttaaaatggaaagtttttttttttttcctgctgtatctctgctttcaactgaagttaaagaattctagatagtttaaaatgtgttagggataagcacacttcaaaagatgttttctagccctaaattttatgacattgggtacttaaatttggagtacactagctattgagaacaatattttgggttgaggagagatggttgaggccattatttagtgggagcattggcattttgaacactgtaaacaaaagaacacttccgcctgctgtttgtaaaagctctttgggaagatcttttacgaagaccaactttttaaaatgtaaattacctacctaatataagtgtcctaagacatgtatgtaaacttccggaactgttttgtctgtgtatttagaaaatacacaagaatctttattcaaacctaaaaatataaacttgtgagcactaaactgcttctggctttgtgaattttattgactgacatttaattcagatttctttgcaagtgtactaatttagactaattggggtaaggggaacaccttaatgaactttgacttatgtataattcagatatctttgtacttaaggcttacaagtttgaattatggaatactataagggttttttgtttatttgtatgtttttatatgaaagtacataaatgacagactacctccaagtaatcctgctttaattaatagcagtgatttgtaatcagtgtatcttttaagattctctacaggttttagaaaatattaaaaattccctgtaatttacatttgtgcataatcttggaaatgggttgaaaagcaaaggtaaactgcttcatcccatgttgtatatttgtggactgattgactacaagtgatgtgatgttataaatttgaagtctttgaaactttattaatgtagagaaaacataactagctttttaggttatttcaaagttagtaatagagcaaaggaaatcagaactggccagatattcagacttgacttagaaaaacaggagtttgttgattttgtttggagaagggcacaataaaggggagcccacatagcattataatgcctagtatctttaaacatgtaaagagctatcatgaggcagaagaattaagaaactttatatgtttctaaggggtcatgattgggaccattggctcaagattgaaaatcggtttttaattatccaaagatgaaatggggctgcttcagaaaaaggtctaccactggagataacgctatgaaaagtgaaagagattacttaatcattttgacaaaggcagtattgaccagacatttctatttcagagttggatttgtgcttagttttttttaggtgttgggacccttgtagttgctttttattttgcttagtcaacaaacactaaaatgataaaatttggtatgtataagtactggacgaaggatgttttgacactaaaaaggacataatttaggaaattaagaatttagacaccaagtttggcttaatagaaaaagtcactatctgaacttctttctttttcaccacaaatcaccgcagaccagtgtttgggagcaggtgtaggaaattgaattattggatctatgtttaggtaagaaaactaaaggtacttcagaatttaggctatgacataactgtctttctgaagtttaaagaaagaaagtgaactatagaaatctattcagctaattaaagtgaatgaaaaatattacagattccataactgcatggcgccttacctgctattaatactgccgccttactgtcagccagatgattttttcccaccacggccagtcttaaatttggcaataagaaaaagctaatcttccaagtgtaagtaggtatgtgttagaatcttggtgaaagataaacacaagacagtcttcttggcgcaggtcctaacagttggtgagataatacataagatggtttcaggattattgtagaattatttaggttgaaagagactgtaagagactaatgaagcatacccagagaggttgctacagtgactccagtcagttttaggacccaggactcctgaacttcaatttcagtattatttttctgtaccaaactcattcaataaatacttgagattagggataagtttgaagttagaagattccagagtacactcaaatagtatttggcacatagcttgttgatcaaaagtatttactaagtgagtgacaaaaggcactagcaactttaaggattttgcctattagtatcatatggcatgtagctatcaagccagtttcgtttagttattttgtgttgccaagcatatgatacgtggtgtcacactgagcctttgggatcctttccctggatacataaccctagtagataatgttactgcaagatgtaatgaccaaatccaacctactgcaaatgttactatggaaatctcaatgcaaaagtagcctttgtgattttttttttaaaccgtctccataacagaacacttagaattattagccatttgctgcaaagtatttgttttaaaatgtctggcatatacaccactaacatttaaatgcccaacattcggtctatacgtgaaaaaactagaagaaaagccctgttggagttttgatgtagagtgcaataatacatcaataaaggtattttaaaatgacctaatgttttagttgccaacatgatttttgtatttgtaaagaggtatgttgggttttggcatttatattttaccgtatgaaagacatattcatgtaaaaggtaatgtgaagcttagcatctcttgtcaacctgtcccctgtttccaagtagtctccttggatatttgtagcatctggattcctaataatccagataattaggattatggcatttatgtacagacatgggtaattctccaaagcagatcttcccacactaatttttcaagtacttgtcacctaaatcattaataaaatgtgccaattccaaataatagcaaatgtaggaattgaatcagcatcccagagtactagtcctgggccatatcctcattaggcaaaggaaatttgaagaagttattttaggactttacctaaggtgaagtctagaattttacatatgtaggtatgtttttgttagtcttatatttgcctaaaagttatacgttttattatttcataggcgtaaatatgtttttattaaaatcttagattagactgaaggcagtgttttggagccaggaatcattctaaacttttatcctgtatttgccttttaaaggtagctgactctgacaccccagtctgtggtggtctttcattgctccgggtgacttgtaccacactcaaatgtgagctcccgtttcattctgtggactcttcctctttggtcatacatgcattccacagatatacattgagtgcccacttgtgagaaaatgggtaggccctttgatgaataaggagaccatagggtatatagtgttctcaattattactatactgcaagtcaagtcagttgggatgggaaaagatgaaaaattagacaaatgggaaattttaccaaaaagaccctttgtattagccttttttttttttttttttttttttgatggagttttgctcttgttacccaggctggagtgcaatggcgcaatcttggctcaccacaacctccacctcccgggttcaagtgattctcctacctcagcctcccaaatagctgggattacaggcatacgccaccacgtctggctaattttgtatttttagtagctacagggtttctccatgttggtcaggctggtctcaaactcccgacctcaggtgatccaaccacctcagcctcccaaagtgctgggattacaggcatgagccaccacacccagacttgtatcagcagtttttaaaagcaggagtgtttgggaggggtaacaggttacaggatgaagacaaatataaaatagtgcagattaagaatgcatacaggcagcactttacattgtcccccttcaacataataagaggggaaataatactttcaccttaaaaatgcactacagccttttgggaaaaagatgttaactattaattttggcatgtgcttgacatttttgtattaactggcatagacattaaagttggtcagttaacgtctttttctaggataggaatatatttttttaagtgctgcttgtttccatcagctatattggataagtctgtagaactagaaaagctcttttctcagaagacttggtatatactcagggaaactgacacagtagagtctacctaccattttaggggtgtagatgatggagagggtttaaagacgtagaggagttttcctatccaataaagcagttcactaaaattgcaggtacttaggttaatgttcatttcactttttatggggtggtagagaaaaaaatcaccttacaggatgaaatcgtaagcttctgtaagtattctcaaggaaagtgatagcctaagtatctgtatttaattttaatgtgtttttttaatttaaaaaagcacagcatatttacatcctccaaaattaatatatcaaatgtttaataagtttaaaattccaattttctcattggttggaatatattattctggatatatttcttattgcctattgtatatgcgggtgtattttgctttttagtcaggattatttgatgtatgtaggaatcaccaaactttctgtaaggggccagacactttggtttggtgagccataaggtctccatcacaactattcaactgctgttgtggcataaaagcatccatggacaatatggaagtgaattgtaaggctgtgttgttgtgtttatttacaaaattaggcagcaagccacagtttgctgatccctgatctataggttccccttcccccgcaccttgtccctgtaatacatacattgaagaatgatgtgccttcctaacatcaacgtattattcctttccagagttacaaatcttgagtagcaaagagacttaactttaatggcatcgttttagctgcaaaggataaaaaccttaccatctcagctttcttaaacagcaagaccttaataggagtttagttacaccatatctcagtacccaaggtgtccccccaacccccaccaccaaacaccctggttcctagatgaaagaaataatatatctgattcagaaataacattcagaacttcatgagaggagactttcacttgctaataaaaataatttgctaatttagacccttttgttgccacatttatgttaaaagagccttttattttcaatcatgcttcaaccttgagcactgtaacatagactttctgtagcctttcaaatgttgagtatctgattaacatctacattcataacaaggtgtcactaaattagacttgtcagtcatcttgggcatagcttgagaatgctaagtctgtgaatcaaaacagctgacctgaaaaatactttccatcaagccctcagtaaagttcccaagactaaagactatcaaactgaataataaacctttatgtcatgacacactgattccccattggaacccctaattgaggactttcttgtagactttgtgttgcccagtctggtggaatagtaggctctcagtaagtacatgccaaatatacaaattcagtgctgagcacaactctggagtcagaaaatttctatttaaaacacaagttgacctaacttgttccaagagttttcccataatattaaggctaatattaatcagaagttagtttggttctaagggatgtagaaaaatttctattgtttttcctgtttaatgagatcctatcccatcaggagtgtcagatataatcagggaagatatataagggaactctaaggaaaacataaccacttaagattatgagggcattccatgcactgtccaacccatagcaatctagattctgtcttcgatattttagtggaactacccttcaaaaggccactagtgactaattgtcaaatacacaccccactctgcagcatttagcattattaatgactagtttccttcagataacactcctcttatttgatcctgaaagcatcgatattcccctatttctttgctgggcactctttttttttttttttttttttttttgagatagggtctcactctgtcaccaaggctggaatgcagtgatctcagctcacttgcagccttcacctcttaggctcaagtgatcctcctggctgcgtgctctttcccattgttctttccattggtgttactccattccattgatcacagtggcttaaactctggtaatttttatccctgatctctttggagtttgcaaacatggaatgataccatgcactattgcttggtgcataaaggatattcaatcacaatcctaatttgggtcacagttctttagtttctgttggatgtcctcaaggtctttagatttacattttactgtacggagtctcaccatgggctgatgttgcatagtaaaatcactttcagaaaaattacaacctcagcttttctgaagatatttaatgcatgccagccatgttaacactgtttgatgaggtggtgtctagctgatttcatcatgtctcatcaacatgtatgtgtctctgttaactaagatcaatagaatcttagagctgaaggaatgttagaaacaaatactctgtactttatccagcctctgcttgaactcatgccataaatgtgtacctcccacttactacctcatataacaggtcatattatcttgaggtcctatcagttcttccctacatttgaggcaggtggaaatctgcctctctacaacttccactggataatcatttcatcccctgaagccactcagattaagtttgagactacacataatggtttatgtaacagtggagattggaagggagagaggagtgcttgggatcttaaaatttttctatgcctaaaaaacaatactctaggttttctttctttcttttgagagaggatcttgctttgttgcccaggctgaagtgcagtggcacaattgtatttcactgtagccttgaactcttaagctcaagtgatccttctgcctcagccttctgagtagctgggactacaggcatgctccaccactcccagctaatttttttttattttttgtagcaacaaggtcacactatgttgtccaggctggtctccaactcctgacctcatgcaatcctcctgcctcggcctccccaagtgctaggattactggtgtaagccaccacacccagcctctgttttcatttctgtaagaataatgtgagaaatccacgctgtttaccctttttcagttgaatgttttacttttcaagactaagaattgaatatttgatatcaaaaattgatgcccaaaaatacattttaaagagaggcatcaagaattattttttataaactaggatgttaatttgctggcactggtataacacttatcttggagaagcaagtttaatcttaagtttgcagtttgatatcaaaatttaaatgttgcttaatcccaggcattcaagaatttcataattaattgacttaaggcagtgtaattttaacattcataaatttatgcaattcctttagaaaatgtattacagggatgatgagaggttttttctttaattgcattttagattatagtctaaaagaaatgaggaatatttcagtatttattattaaattcttgtaaaacttcaagtccctcaagcccaagtcattcgcctctttagcagcaggatagattcaaaattatagctactttgttatttttatgctgtccttcttttgaaaaacattaagagtatatgtctagtgcatttgtgtcactaagatggaagaatttgaatattctcactagctaatttacatcctaaaagttatcaatgctcattagcaatttttgaacttaaaaatatgagttaggaaattccctaataataaacacccaaatgcattttctaaggcttattgtgtgccgtttgaaagctaccaccatagatgtcattgttctcttggcataaaatctacgaatatgagagagctgagaatcctaagaccatccttcctgtctaggtgattcattttattgccatttgcagcaattgattgatatgcgtgacaaagggaagtttttac

SEQ ID NO: 51 - DNA, 3039 bp, Homo sapiens
tttataatattccacctaataatgaaacgaatttagaagattgctcagtaatgcagccacctgttgcctatccagaagaaaatacactactcatcaaggaagaaccagatttagatggtgctctactctcggggccagatggtgataggaatgtgaatgcaaatttattggctgaagctggcactagtcaagatggaggtgatgctggtacttcaaatgatttcaagtatggattgataccaggtgcttcaaatgatttcaagtatggattattgccagaatcttggccaaaacaagaaacctgggaaaatggcaagtgaatcatctctaatcatgaacaagttaaaatgccctcattgtagctatgtagccaaatacagacgaacactaaaaaggcacttgctcattcacacaggagtgagatcatttagctgtgatatttgtggaaaactgtttactcgaagagaacatgtaaaaagacattccctggtgcataaaaaggataaaaaatacaaatgtatggtgtgtaagaagatcttcatgttagcagccagtgttggaataagacatggatctcgacgttatggtgtttgtgtagactgtgcagataaatcacagccaggagggcaagaaggtgtagatcagggacaggatacagaattccctcgggatgaagaatacgaggagaatgaagtaggagaagctgatgaagagctagttgatgatggagaagatcagaatgatccctctcgatgggatgaatcaggagaagtttgtatgtctctagatgattaactgacctactatactcctcaaggatgctgcatttggacctaatatgaatcgacaatttggattgttgaacttgaaggcttgcaaaatatggtacatgctggatagtagttatgttgctgtgaaaactgtagggtcaaagccttatagcaaaaaaaatttttttttatatttgcacaggactatacagcaaacaaccatgtggttggattacatggagtccccacatactcagtcagttatcaaagtaaaatattttttatttataggatatacagtaactatttgggtcctatgaaaatagtccttaaagagcttacattcatgtgctactttaacatgaatggagaaaatccgtttatggaagtacagtgacaattgacccaatcactctgtccatcaaaccactcaggctagtttgtactagtagagttttgtttctatttttatttttattaattttattttttttaatacagattttcagtgaggggctttttcaaccccattggttctattttcttgtatttttccatttaatttgcttcataacttaaaccaagtctcttctagtcttaggtattatttctcgattttgtgctgatgggcatgtttataagaactggagaggtaatttattggaatgaactaactgacttcctccattcccctcttcctttttgacatgaattttactacttcacaaatgaagaatgatgttatgaagttaccgtggcgaagttgacaaataccactaaaatgattatgatttagaagtaactttcttctgctgctctaatctgataaatggttactatatgatattttctgacatggtatttggttttgggtatctgttactttggcactattcttgtttgcctctttatttttgccagtgtactatacctcagtcctatttgaaagacctaattgaaagaaaaatcatagaaataagtaaaatgatttgttttataatttatccaccatgtccagtttggttagcttgttatgcaatataagtgaaatatcaggtttttacccgtgtcccttttatcatgaaaattaacacaaaatgtgcattctcttttgtttcatacttagcgggatattgattgttttgaaattatgatcaatacttaatttatttttttctgtccttgaagtcactacaccttgatacagtctttctagtagtcaccatgattcaacagtctcaaaaatcttacaaataaaattctgagaagctttattattctataaattcttcagggtacaaagggtgacatattgaggtgaaattgtcagatttacttagcctggtgacatgaattagctgattgtggaactctcagcagcatttcacgtattgttaacatgtatggcatttattagcatattgtatattatataagattgagggatgtcatattttcagctttcttttaaataaaaattgagtatattttcctattttatatcaggtaactaaattatgctagttatgtggaaaaaattgcaaagatgctttgacagatataatccctttggtgctccatctgatcaaagttgaaaagttgatgttttttaagagacaagctttatcattgtctctgatttcagtagaataatggtttattgttagacaatgatgtttctgcttggataaatcaaagataaattacagttacatggttagatgcatcttttgtcatctatattgtagtttctacataactgtaaacctgacagataagaatagtttcggtttgatttttgtttaaaacagatgagtacttcttaatgttctagacaaatgagtaaaatgtatttctggtagaaattagttgggcaaagatactatgaatgaaaaagtattttaaacgtaaaatgttctttgtgaatatgtaagtatagtataaagatttctttcatcccatttatccccttcctttaaataaactagtttacaattggtagatctgtctatatataaatatatattaaagaacaaagatatatatctaaaaatcacctaaatctgctttattagactacagttcacttattgcatagaaactggacttggctttacattcttaatgtacttttacttttcctcaagatatgaacttactctcttgaagctgaattttcttttactacttaaatcatttatgtatatctggtaaattatgaccaaatttttgttagattgcatacagtaaattgaaatacacacttggt

SEQ ID NO: 52 - protein, 185 aa, Homo sapiens
YQVLQMISSMDYCQNLGQNKKPGKMASESSLIMNKLKCPHCSYVAKYRRTLKRHLLIHTGVRSFSCDICGKLFTRREHVKRHSLVHKKDKKYKCMVCKKIFMLAASVGIRHGSRRYGVCVDCADKSQPGGQEGVDQGQDTEFPRDEEYEENEVGEADEELVDDGEDQNDPSRWDESGEVCMSLDD

SEQ ID NO: 53 - DNA, 102145 bp, Mus musculus
  misc_feature (1)...(102145): n = A,T,C or G
attaaaggcatgcgccaccacgtccgaccagcaactgttttattttctgcagtgggtatgggcatgtcttcagctccaaaggcatggagcatgtttggggatgtcctgttccctagacttgtccagtcccttggtttccagtcatccccacctttgccccactcattcttcccagagtgctatcccaagacgagggttctaaggaccaacttccaaagcaggtagactccactttatctcccacctgactctgcttcctggtgaggcattgcctaagcactcctgaccccatctcacctcataaccagaacaccattattccttccatgcctgcacagaagaccctgcttggcaagaatcctgccatctccttacccactctgttcctgttaggaagggttgagagaaagccagtatgtctctatgaagacacgtgcataggaaacttacacagaatagatcccaggctgcctgggtcactatgggctgacgttaataaacaatgcatgttttctggatgaagaaatggtttactgaatgaaggaatcattttatccagtcactcactctgttcactgtagactcagatatctgacattaatcaattacttctctccagccaaagaaagggagactgtgtgctcccacaaaaaacacttggcccctctgcatttaagctacgctctccaagaccttttcctcctgtcatttcagctgcccactccttatggccacaccctgtgcctcatcagcagctgaaactgctccacctctgaaatcttgaattccagtatcccactctctcaccacaacctactgctcctcccaccctctccttgcctgactgcacctccccttatcctgcatacacagtctgcattctgtcatcttctgcttgtctcttccagctgggattgagccatgacccagtaccctcagtatgtggattccatgcatccaccgtctctgctagtcgccctgccttggttcagtaagggcctcttatttagagttctcctcctccatctcagtcatgatgaaatgggtcacactgctgggccaactggccctgctattggcacaggacctttctctggctgtccctttcctttggctacttggccattcatgcattcagcaaatacatgttgcacacttgctttgggtcagtactgaaactgtgggaacacagttattggcaacacaggccctgatcttggcactgacctcttattgggagaggcagtaaatagatgcataatcacgatcaaggggcagaattaagggatgtggtcagtggttatcatatacataagaaaaaggttgaaaagaactttaaaaaggagagaagagcttacagtttcagaaatttagtctatcatagtgcagaaggcatgggggcatgcctgggtggtagcggggggtctgtctgtggtggaggcttatttctttttacaattatttttattttattttttaatgtgcctgggtgctttgcctacattgatatcagtaaagcacatgcatgcagtgcctgagaagaccagaagagggtagtgtatcccctgggactggagtcacaaatggttgtgggccatcatatggatgctggcaaacaaacgtggtcctctgcaagggctacaagtgctcttaaccgcccagccatctctccaggccccaaggtttctttctcgttgaggaccaggaagcctaatgagctgactagcaccaggaacagatcccaatcagagcaaggacaactttcaaagcccaggctgcagtgacccacacctgccagccagtctacacacccttaaggctgcaaaactaataccacaagctagggactatggtcaaaccacaagcctatcaggggggacattttggatttgaacataacaatttctagaattcatgaccttcttgcccccatttactaaatactgggattacaggcatgagtcaccaggccccaggcttgatgtcatgacaacagagcagtcgtctcctgcaactggaggtttggggtttagtttatttattcatttgtttttttttttttttttgacttttcaagacagggtttctcagggtagctctggctgtcctggtccttgctctgtagaacacgcttggaactaagagatctgcctgcctcctgaggagtaggattgaaggcttgtaccaccaccacctggatgggtatatattttttaactggcttatgtttttatgagcacgagtctcctgcctacatgcacatatgcatattgcatgcctggtgcccaacgaggccaaaagaagggtgtggaaatcttggattggagttaaggataattagaagcctctgctgagtgctgagaacctaacctgggtcctttactagagcagcaaggactattaactactaagccatctctcttctccagacctgttttgtttgagacagggtctaaggtagaccaggctggcctttaaagtgttacacagcaggtgatgaccttgaattcctaatcttcttgcctccgtttcctacgtgctgatattatagacatcagctatcatgtcaggccaaagccctggacttgatccctagcattgcaacaaacaacagtggcttcctagaactaaaaacatttaatttaatgttattgctgttgtgtatatgtaatgtgttcatgttttatgtgtgtgaggtaggccatacatgacattgtcatgtggaagttagagggcaaatctgtggggtcagtccattttctacttttgtgagggttctagggattaaatccggtggtgatcctgacagcaatacctatacccactgagccatctcactggcccagaaattttttattttaaacaaccagatatttatgtacgttgtttggtcctactttcctgatgactactcatgtagccgacatccacatgcttttattggtcataaaaatactatcatatatttttattagattcctttatctttattgagtaccaggagttctgtttggttttgattagaagttatatttgtttcctttacaatcttggagattgagcccaagatctcatatactaggcaagtgttctaccaacaattacagccatctttattttatatttttcagttttgaggcagtatctccttaagttacctaggctggccttgaactatatatttgagagtggcttcaaacatgaaattttcttgctccagcttccagtttcctgagttgttggggttatgggggtggggtgtctgtggtcaaggctggcttttgtttttttttttaaattaaaatttaaaaaaatttattccccccacaggcccacacacccacacacacacacacacacacacacacacacacacaccttgagacaggatttctctgtgtatccctggctgttctagaactcactctgtagacgaggctggcctcaaactcagagatctgcctggctctgtctcctgagcgttgggattaaaggtatgtattaccatacccagctaatttattttaaattttttatgtttgtgtgtctgtgtagaagaaatgtgtgcccaagttgcccttagaggccagaagaggccatgggatcccctggagctggagttccagttgtgagctgccacatgtagttgttgggaacagaagagcagcagaattgtttctccagccttccctggtgacctaaattagccatggactcagaatcttctttctttagcctccccatggctgggattacatgggtataccaccatgcctggctaagggctcttcacagaccccagacactagtctgttaaatgtgtattttgtaaatatttttcccagtctaaatacattttcccaatttatcttcatttatttacatatgtgtgtatctgtgtgaatgcatatgtatctatttgtgcaggtgggcttgtcttgaggacacaggtatcaggagaaggcactggatcccttggaaccacagttacaggtctttacaggatacaaggatgaggttcattgtgccggtgctgagatagaaactctggtcctcatgggtgtgttgttagcgttcttaactgctgagccatctctcgagcctcagtcttgatatatcttcttcattttcttaaacaagtcttttaatgaccactggctatcatctctcatttcagcaacagtgatgggaaagtgctaagccatgtgtagtaggcccttgttatcatctctgcctgactaaatcatctacaaaaggagctgtgttcttgaacttctgtgtattttgtcttttgtcataacctgttcactatgattagtctggttaagttaagcattcacagtgctgtggttaccaggtctgaccaccagagttaaatggtgagcatgcaccagtgttgtgcacattacactgctaaattgccaaccgctgtttacatttattgaacgctcacccggggagcaaaacttgtctcctccaaaactcggtgtcctgggtcaggctgatgatcacctgactctgtaagggggtagaagaggagaaaaatacgcgcctaagagaatttaaagcatcttatcaggctggaaagaggattcatccatgaagagtacaaactgctgttgcagagaacctgggattgggcccaagcacccacattgggcagcttacaactgcctgtaactccagtcttacaagatccaacacctctacccttcactaacattcacatacctaaatacagacacaaccataactaaaaaataatacaatagtttaaggaatttgtatagctgagaacagctacaaggtaaagtatttctaacagatgttactgttgtttagcttatctatagtgggaaaaggggcccagagctcacccatggtgagttcagtggagaactccagctgactcccttacccttcttagttggcttctgctggatgtttataaagtgcacaaacatggtggggatcttgacaatgtgacacattgttctcccaactgggccattccagtcatctcggtgtttttaacacctgatttgatgtcttcttgtttatctgcttttctgtcggctacctgctatttattgttttttacttttgcttactttatatttaataagctcactcattcaaaccccaaagtatggctattagaggccatctccagggctgtgcagaacaggcagtgacccgctgtgcaagctttgagggaatgaattcaaacatggtcacaatgtcaggcatcaattttatcataaggacaggggtcaggattggggaaagcaaatgcagtcttgtggccagattgtagttcacagatgaaattagttagcttactcttgttctcagggaatatctgacactctttagccaaaggattcttttaaatacatattaaagcattttaagataaagaaatgggaagacagatatgtggggtcagaggatactctgttggactcagtttattcctcccacctggggatcaaacttagggttgctaggattagcagcaagcacacttaccctatgagctacttctacagccctctgtcaaaggattctacaattaaacagctcgagcctggtgtggctgcacatgcttttaatcgcagtattcagaaatctgaggcagatggatgtccgtgtccaaggccagcctggtctgagtggcagacactctgaaatcagtgatttgcggcattttactctcacaacagccagctgcagtatgaaccagaggcagggggctaactctcactatgcagcagcacatgttagagctagcagtgaagcccaagcagtctagttcagaagtctgtgttccacagcccctcatcaaagttcactgccccccgccccgcccccgcccacggggaagcctgggtgccttgttagacaagatgtcaaaagcactggagcagcactctctgagtccagctactccctcagcggctgtcggctgggcaaggtaggtcagacctttggggttgaatgcgcagagactttgctcatgttgaagcaaagcctgtgttctcttctgtgcagttgctgactatcaattgtgctgttcctgttggagagacaagtggatgtgtttgaaataaaaaccatctttgtggagctatgtggtatcaacaagggctaaagcgtatgaaacgctgaaggcctttgggtcaggataacttctcccccttctttctatttgtgtgtgctgggatcacacccacagccttgagcttgcaggcaagtactgacccactgaactaaattcctagcaaagagtgctatgttctgtatgcatctcttccctcagatttggatgttgaaatcctcaaggggatggttagaggaaggggaatggtattagaggaaggggtctggggagtggggtggttgccagtcagctttctgaagctgtgactaaacacctaagaaagcaacttgaaaagaggacaggtttacactggttctcattctcagaggtgtgggtcccatggcttcgaggctccatggtggcaggaacatgtagcccaggaggggatatgtgcctcaagctgtcaggaagagtgaggtttttaaaaaaaaaaaaaaggagaaaaagaaggtggaaaaagagggggagagaacttccataggcatgcccccagtgaactactcctccaagctggcccctacttaaaattttaaaaaattctttacattatttactttgcatgggggtgggtgcacatgtgtttggaggccacagaacaacttgccagaattagctctctccttcactatatgggtgctggtaatcaatattagatcaccaggttgggtacaagggctattacttgttgagcccaggccccaactcttaagagcctattcaggtatctgttgatcaagttggagctgttataatccaatcacttctcaatattaccatcagctggggatcagtgttcaacacatgaacaattttagggagtataacagttcatattcaaactatagtgggggatgatagggttaagggtggagttcttataaatatgatttgtgggtttgttgttgttttgtttgtttttaagacagggtttctctgagtagccctggctgtcctggaactcactatgtagaccaggctggcctcaaactcatagagacccgactgccactgcctcccaaatgctagaattaaaggcgtgtgccaacactgctagtctgtaactggagttcttataaagtaggttttaggaagctcaaggtcttttctaccatgtgtctttcttagcagtgagaaaatgcccatgaaggaagtcagtcctgaccagagctgaggataccctgaactttgacttacttgcctccagaattctgagaattttctgttgtttataagctacccagtctgaggtgttttgttacagcagccagagtgaccaatggtttcatcttatcaacaagtatttactgagagggtcctacacacctgtattggctcaggcaggggccataccgatgtcactgactgaggatgagagaggtgctcagagaactacaatccttgatgataatcataggtttgcttcaaagtacccaataatccaaggatgctgaggtccctagctgcctagtgaggctgggcaacatatagaggctctaatatattatttaatatttagtgacaaatacataaaagtagacccatcctaggatgaataaagacttgtaggttctttaaaaaggacaatttttggagttgggagaaatggctcaatggttaagagcatttactgctcttccagaggactcaactttggtccccagcaccctgacaaccacctgtaacttcagctccatgggatccaatgtctttagatgtaggtacctgcacttctgtgcaaatacacactcacacacacactttaaaataataaaaacaaagtaaaatgagtcctattaacttcaaatggactgccatcttaagggaactatagtccccatagaaaaaagccaactttagaaacaacagccttacatttagttcaatactatcaaagttgcaggatattttaaataattgcaaaccagtcagagaaaaaaacccaaatctgttattaatgacattcatacagaacagaaaaatgagcaatatatttaacaggtgagtcttggtaaacaggtagaacttgggtataagggcatgggaggtattctgaagtccagcacagcaaaccttcagatatgacaccaaatgctcaaacatctaggtgctacaggagacagtactgagctgaaacaaaatggcctagtatctttaaccacattagaaacagaacacatcaacaaactgtccaatgttcttgcttcgatttttcttttaaaatgtttatgtatttatttatttgtctatagacatgaacatgccactgagggtatatggaggctggagaataattggcagaagtctgttctctacttctgtcatgtgggttccaaggactcaggtcatcaagcatggtggcaagcacctttacctactgagccttctgcccagggtggccttgaattcactatataggtattatcttcaacacctcatccttttgccttctctgaagtgctgagactggatgcacacaccaccatgcccagcctttttctttcttcccttttttaatactacagagatgccaaggtttagatcttcaatatgggaaccagaggcagaaacgggctactctacagatttagccaaggtgactatgaagacagcattgagctaataaaaagtgcatggtggaacagtgaattaaggaagctggttttagaagtaggcagtcatggtgctggcaggcaattgtggtgataaatagattacaactaaggtctggaggccagagaattttctagttttgaagacacaaaataacttttgattgagttgagatattacacgctaagttttgggattctaacctctttatacatttatttatttatttatttatttatttttgttgagactgtaatccagaccttggtaattctccagtctcagtcttttagacactagaattttaggtgggggtcactgtgcctcgcttgggaattggcaattcctcagtctaatttggaatacgagcacaagaaggtacgtactgtctcaatcacctaagtcaaaaattcttgagcacatctatgggtgatcccagaggaaagatcagtcgtcccagaaaggagtgaagcagctgtttgaactttaaggggctgacagggacctgcaactcagcacaaggtggtctgagtggtgtctacatggcaccatcttaagacctgggagtccggggactgtgccaacactacttgatagagaaacagcacagaaaagttctgtagcagatcgctctgctcagaaagaaaaggcttccacgagagtacaagcctttgcaaagccagcaggaactagtgagccatggcccaggggcaaatgaagatgaaagcacccgaccgagagggcttgagtggaccctgactatgagagcgtaagtgcctatcaaagagtcgactggagccagggtttgatagtggtttcacatgactttggagaatttcacatgactttggagaaaacattacttaaccattctctctttcccagactcgtcttttcataatgtgtttggaagaggatatagagaaagactggcgagggtcctctactgttagaaagtcatcccaaggcctctgatgtggacaacagaacttcctaaaaatggtaagtggttataactgtcacattctagtctcaaatgatatcaggttcaaactcacttccccatctcatgctttctcgtacgatttttcttttcattttcgctttttccaaccccaaagcacatctctccggacccgctcttgccgcctctagtgcctccgccctggggcagcctagtgagcgcgcacttccggagccaggaagtgcgtcatcatctcgcgccagttcccgcacattgtgccggttcgcctcgggtttggatgctggggtattcgggtgggtcggcgttctgtgactgcgtgccgggctccggctgctccgcgctgcgatgcaggtctccagcctcaacgaagtgaagatttacagcctcagctgcggcaagtctcttcccgaggtgagttctcgccccctcgccatcgccctgggagcgtgtatctctaacttaccatcggctgaccgtggtggctggttttatgtcaacttgacacaatctagagttaactggaaggagggaatctcaattgagaaaatgccccccataagatctagctgtaggacactttcttaatgattgatggggaagagctcagcccttggtggtgccattcctgggctatggctctgggttctataagaaagcaggcccagcaagccagtaaacagtactgctcccatggcttttgcataagcacctgcctccaggttcttgccctgtttgagtttctgttttgagtttcttcagtgatggaccgtgatgtagaagtgtggctgaaataaactttcctccccaagatgcgtttggtcatggtattttatcacactataaaaaccctaagacaagaccgttgttttgcctgcattgggttcacgtgtaagaacgtgctgtttagaaactactctcacgtgctttaattaaaaaccttattgcctgaaaacagtcagagcaatacagtcacagactgcagagaggaggacgactgtggctcacccttagtctgtttaaagtctcatcctgttccaaatgcagactgccttggcgtatgcttagggtctagggaggtgagttcacatgtttagagattattttgccataactagtaagaatagtacattgacttttcccttttagaaaggattttttttctattgggggcatttaacctcaaatttattgacgttttaagctggacaagtcttgttgctagtgttgtttgccagcatccctggtccatacctacaagatccaattgtgatgacagactaaaatgtaaagacttgccataagccatctgggaagcaaaattgtcccggtagagacccagccactcagtgtcacgataactgactagtgctttggttgctgttcattcaactgttgcctgtagaagaaaatcagcttccagtgaatgtgctggtaaaaaccacttcttatccagggtcgtctattaggccagtcataggtctgtttctattctttgtaagaaatacatttggctggcaaagagacacgtttataatcccagtgcttagggcgctgagacaggacatttgtgagcttgtgttcagcctgggcgacagagcttacattgtgtgactctatcttaacacaggaatatgcacacacattgggtgcactcactccatatagaaattaaaacccatcatttcaagagtttgcattatcttagcttagatggattaattttatgcttttataattctttgtaaaacagatgctttacaattgtttagtatatgtaaatatattttttagaaagtccagaatatgagggctggagagatggctcagcacttagattactgactactcttccagaggtcctgagttcaattcctagcaaacacatggtggctcgcaacggtctctgatatgatctgatgcttctggtgtgtctgaagacaacaacaatgtactcacatatataaaataaattagtcttaaaaaaaagctgggaagtggttaagagcactttctcttcttccagagatcctgagttcaattcccagcaaccacatggtgggtggaaatactttattctgggatctgatgccctcttctggtatgcaggcatacatgcagacagagcacttacatacattaaaaaaaaaaaaaaaagtgaaaatccagaatatatgttatcatggagttaagattatagaatagtcctacttttcattttattatttcctgtaagcatacattttctcaaatgaacattattttgcatgtggaagataatttaggtgtgttttaaagtgcactgtctgctttctcgtagtggctttctgacaggaagaagagagcactgcagaagaagaatgtcggtgagtatgcagggtgctccagcttgtcatctgcctgtgggcagtgtcctcagttctctggctctcaggcatgggctgtgggaaataagctttttgccttctgtctttggcattgttggccactgttctcctggtggtgtgatgtcccccttccggttaacaaggtagcctctccccctcttatggatggcagcgaggctcctgggttagagacacaaacttcaggatgcacgacatggcaagatggcaggaatttcagcatgtttatcccagttgccccttgagtcagcatggtttggatgaggcctgtacacagtgggtctacgtttcacagaggagcccagaggtgggaagcccactgttttggtagcaggcagaaaacaggcctgcccttctatgacctcctttgtcaaattcctcaattgccaacagccctgagacatggctcaggtaaaagtggtcagactcttgcaggactgccatactcagcaaagtggcccaaggaggactgtcgttcaaaacagttctgtaactgctttgttcctaatgtgtcagaagttttatctgttagttgaatctctgtgttttgcaatagacagacagtaaaagttttctttataaacagaagaactttgtgtgtaaaatgtctggatgtaaacaatgagacccatttgtaactcacagtttattcccattaaacattttccagttcaggttgccacgaaaggaagcttaccttcctgaagatttcagattttagctgaatctctaaaaatggagagctaggagggtttcagcatgagattgagatcttttggcaagcttcttggaaaaaacgggctctatatagtactaaagtcgggtaagaagtgagatttttaacttggaggaaacatgctgcctggagcttacagactggggctttatctgctccccttccagggcattcacgtgtagcaaaatggattcaggttatttatgggaagaaactgttttctggcctgcgcaggactaataggtgtctagcaattcaacttgttcagtatttgatttttttgttccttgtgatgccagggattgcacccagggcctcaacatgctaagcatgctatttagcactatggcacatccacaggccttcctctaatcttaatatctgggttttatatgcaaggcataaatatgtcatagataagctgtgttcacagtagtgaccagtcagaattcttaccctggtagagaaaaatatagttttttgagagtaggtcttagtgctgtggtccacagaggctgcactaggtcttcctctagcctgggccctcttggccacagagaggcagagctagcaggcaagcatcaactctacgctaatttctttgataagcctaagattttggaggctatgcctagatatgtttagtggaaatgctgtattttgttgcagcagtgactgatgatgtgttagtgttcctccttgactgaggtctttaaactctttctgattatcattgtggacttttcagttaaagaacatgttctttctttttaaaacatgagaaaaaagtcagttttccattacggtagcagagtacctgaggtaactcaaaggaggaacgctttgttttgcctgtacaagttgttttgttgctttcaggcctgtggtgaggcagcacgtagtggtgggaactcatggtggaaggggctgttcactgtttagcatctaggaaacaagaggagatggagcaagtgaatatcctatagtctcctttgagggcgtgactccagtgactaagacctcacacccctcccccaaaagttttactacctcccagttaaaactgggcccaggagccagacctctggacacttgggtccctggggggtttcggatccaaactgttgcctggtaggagcgaagcagaaagctgggtgggctgctggggtcgttctcagggctgggagccgttggattgaatcctgctgcctgcagtagctgtgcctgtccggcatgccctgtgctccttctctgatgctcgtgtggaacaagtttccatctctcccccttccctcttggcagatgttcgtaggagaattgaacttattcaggacttcgaaatgcctactgtgtgtactactatcaaggtgtcaaaagatggacagtatattttagcaactggtaagcatttctgtggttccgatttatctgtgttcctaacaggaagtgctctagtaggaaaaggtcacccctttgtttacctcagagtttcattatataccttttcagacatacagaaatactcagaaagagtttaatgagcactcatttcatctgtgacctagattctgcactggaatagttnnnnnnnnnnnnnnnnnnnntctgcactgaatagtttactgtgtttatttatcaatctatatctttttaaaatgagttttcggagtaggtcacagactaacagctttttcattttatttttaacttttggcctcattatgtatcctagactggcctcacagtcttcctgcctccacttccaggtgctgagattgcaggcatgtgcatccattccaggttttgcccattccattttaatggcttcatgtatacccagccaatccctttgtgctgtattgatggctggctcagtaccaatgctgtccatatctgtaaccctgtgggttggtttttttttttaggatttattatttttatttgttgtttttattttatgtatagcagtagcatgtaagtttaatgtgtgtatgcctaatgcccagaaagccaaaagagctttggatcccaggaactggacttacatacagttgtaggcatcatgtgggccctggtcctttggaagagcagccagtctcttaacagtgataccttcagcctctgtttttattttgagaaactgggaaagagagttgagaagacctgagatgtttggacatagttactgagagctggaaggaacttagacctttaattcaggtcttctagatccagagatactgaaagatgggcccagtgctctttggggtaggtcaagtggtagggttttgttactatttgatgtaaacaggctcacactatgcagctctggctgtcttagacctggctgtgtagaacaggttggcctcaaacgcacagagatgcccttgcctcccaagtgctgagattaaaaatgcatcaccagggtttggtccccagcactgaagagaaggaaaggagcacgtgtgaatctggcctgactctaaactgaatgtttccaaaagaagccaagaggctgcttagctctgtgaccggtcacagcttgcacatgccctggtctgattcctgtggatagtaaatgtccctgtcttgacgtttcaatctccaggaacaaattttatccaacttatttttagccacaagtcctagagcagtgacaaagatggaggcagtggcagaagccagagatgaaaggcctagctctaccaccctaagcagacagcagtggattcctaaatccacttctatctccaaggaaagggccagagtggaggtaaacaagaggaccctacacccaaccacactgtcccataacagtcactagctgtacagagatatttaaattaaaagcaattacaatcaaaacttcggttctgggactatcaatgttcattattgatgttcattattgatgaaaagtctctaagataaaagtaaagcctacctggtggtggtggcggcggcggcgcacgcctttaatcccagcacttgggaggcagaggcaggtaaatcactgagtttggggccagcctggtctattagagcgggttcctggacagccagggttacgtagagaaaccctgtcttgaaaaacaaacaaccaacaacaacaaagttatctttatttttcctcactgcaatgcaagcatggtacattatatggcatgcaaacattatagaagaacgtgacgtaagatgtgagcatccctaggcagttgctgtgtctacactttctctactcaccatctctatgcagctgcctttagcttcacagaattgggattatatgtactgtgttgcagtcttcgaactcacttctcttaccatttgggagctgctgaggtggctcagccagtaagggtgctggctgaggagcctgagttccatccctggactccacgtggtggacagagagaaccaactgcacggcacacattgggagtctgttattggtgctgcggctctgctcatctttgtgtgcaccatgtttcctggtgggggttaccaccgtttatttaagcaaggccctatcagtggagcctgtttgcttttaatctttggccgtgtgtgacacaaggtgcagtgacattcttcctgtagctgttatgcttgtggctgggtttctgtagtcctagtggtgtaaaatgaaatacagtttcaaggtgaatttctgtcacataccttacatgtattggacattatcagggaagttgactgacacaaatattaagcatccttttttgtcttgtcaagctgtttgattgtttctgtcttcttcgctggattactgtgactcttctaaggtattttaatttcattctctgtggttctttgatttgaggataattatcttacctcaggacagaaagagcacaaagcagttgtataaggtgtggctatgcaactttggttttgcatcatgctaattttttttataggaacatataagcctcgggtccggtgttatgacacatatcagttatccctgaagtttgaaaggtgcttggattctgaaggtaagaggccaaccctgagttcataaatagcttttcataattgtctattgtactgctctttaaaatgggagtgagtagtgtggtatgttttggttgctgtagattaagtagtttaatatgatgctgcacttaatagaccgcaacctgcactggccatgctctgggctgcgcacagggcttctctcaggggatctgccaggtgggctcttacctttaaggctggtctagagtaggcttccagcctcacaaaggtatggctatgggactatgggtctggaaggtagtgtctcccttcttgctgggtctcagctggactccatttgctttataaggctgccagcattttttaaaaaaatcttatgtgtatgggtattttgcctgcatatctgtgcactatgcatgtgcctgataccatagtaggccagaagagggcatctgatccacatagactggagttacagatgtggtgcatgtgggtgctgggacttgctcgaacctgggtgttctggaacaaatgcttttaaccaccgagtcctatctccctccccgagagacctcttcttttaagaggttcatgtgattaaacaaatcttcccttggtcatactgtataatggaacctcagggagcatctactctcagcaggggcctggtgccctgtgaaggtcacagggggcattttgagaattctgtctaatacagacagcaaggtaaaatggcaagggtcagctattatcagttaaccagtgttttaggaacaatgggagagaagtaaatgggatacagcgctgtgtagaataaccagcataccttcctagtctcacccttgctgctagagaacatagaaactttgtatgctattaataacacatcttttacaatgtttttgtgtagaggtaaacttggtataggcgaagagttactgttgccttctttctttcttttttttttttttgtttgtttgtttgtttgagacaggatttctctttgcagtcatggcaggttcagaactcattatctagaccagactggccttagactcgcagaggtcttcctttctttctctcccaagtgctaggagtaaagtcctgcaccaccacaggaacacccagcctggggtcccattttaaaggctgctgtttagattatatttcaaaatcttaaaaactactaagaacatctcagcaaaactatggcaaaaatttttaggatcatcctaaatttactttagttctgttaaaaaaaaatctagatgtaagtaataactttccatttagtattagtggggatgttcttcttgttgcatggagaggtaggacaaacacagcaattatatataattattcaccagttaaaccagttaagagggctggggagatgtctcggtggttaagagcactgattgctcttccagtggtcctgagttcaattcccagtaaccacatgggtgcgcaaaaccatctgtctgatgccctcttctggtgtatctgaagagagcaatggtgaatacatttaaaacaaaaacaattagaatcctcacctgaagtttgtggttttgtttaaacactggttgataattgtggtttttttttttcctatttttcagttgtcacctttgagattttatcagatgactattcaaaggtatgttttatagcatatttactttttatttttatttatatgcacgtgtgtgtctttgacagtgaacgccgtgcatgtgcagttgcccttggaagccagagggggcatcagatcctcaggggattgtgagctgctgatctgatcccaggttctctgaaagaacagcaagtgctctttactgctgaactgtgtctctggctctgggacttatttttgtagtaaatatttttaagataattcccagcgataaaaaaaaaaatcactgtgtaataataggtaatatatcattttctgtcatttttcggccaagtacatgtatgatgtacagtatctttaaaaaaagaaaaacaaaacactgggagtgaacttttgctcaccctaacgtcaagttggttgtcagtgtctccaggcctcacctttattctaagggattggtagcagtcaccctttgttaggtaccttatggtcgcgatctgtggttctgattactgatgttagcctaggcatgtttgccttcgtctccttatttgtacaagataaggaagccaacagtttgttcagttcttgtaactcatcgagagggtgtagtgtgctgtggtgcaggtctgagcacaactgaatagacttcttttcctaataccaccggtccatctttaacttttcgtggtcatcttcagtagttttcgattcttatggtagccctttctcaatttcaaatggaaatgatgggaagtacatggaacccttaagtattcaccagttaaaaggatttcaacaaacattttaatgtcacatgcatcctgaaacaaagttgaacttggtagctaacgtggcttcccttctggcttcagttcctccaactatgaggcacagattgtcttgttagctgtcgcagctgtttatctaggattttggtatggtgatttttataacttactttttctagtattgctagatatgcatttaaatactatgttagctttccatgcacacctctgtcaaatgtgcacatgtgcacacacatgtttatatttgtacagagtgagcagggggagagatgagagttcttcttgctcgggttgttttagtgatgacgaaagttaagcaaacaaaccttgatttttttttttttttccttttcagattgtcttcttacataatgacagatatattgaatttcactcacaatcaggcttttactacaaaaccagaattcccaagttcggccgagacttctcttaccactatccatcctgtgacttgtactttgtaggtgcaaggtactgatcagattatttttgctttctcctttccacctctcacacaggtagctggcttctctttttagattgcctgtagactttatctacttaagtgtccttaatagagaaagtgatgtgtcattactgtgaaagggaatcaatcttagaaaaagagattaacactatatatatatacatatacatatatatatacatatatataatagcctatgtgttgatatgtagttttttttttaaagaattatttgtttattttatatgagtacactatactcatatatgagggcatctggtcccattgcagatggttgtgagccaccatgtggttgctgggaattgaactcaggatctctggaagagcagtcagtgctcttaactgctgagccatctctccagcccgatatgtagtttctagtaggtggaattataatttttttgtcttattcagtatcaatgattaatttctctgtggaccattttgtcactaatggcatatgtagttgtagagttgggttaaaacctacttagagggctggggatgtggctcaatgctcaagttctttgtctgcaagcatgaggacctgagttacgatcctcagcatggcagtgcaggccagtgacaccactgctggactgtgtaaggagatcccttggagctggggttgcagatggttgtgagcggtctgagaggtgctgagaactgaacttgggttcctgtaagaatctcagatcttaaccaccaagatgagcatagtgtatgcctgtgagtgagagctgtcatgagcttctgaagtttatacttactcacccgaaatgcttatagttcaccagatcctttgtcccttgcagctctgaagtttatagattaaacttagaacaagggcggtacctgaatcctctccagacggacgccgcgtgagtactccagttctactgctgcacgaattttgcccaggagatggagccagaggctcgtgttgttatcaagtgacctagttgcattaaaccagcatcctgggccatcatttaaaagaacatcattaactgctcttaatcagaactgaaggtggtggtccgtttctttccttttcccaagaccactaccacctgaccctatgatttcttaaaagtttaagttcttatataaaaagacttgtaatttaatcctagcacaaaggaggcagaactgggtggatctcttgagttcaagaccaacctggtctacatagcaagtttcaggccagctggggctatagagagagaccaggccagccaggattttatacagagaccctgtcttaaaactgcaacaacaaaactacccaacttttaaaaactcagtttattatttttacttttattactaagttttcatcaatgatttgttttgtgttactctttttttgtgaattccttttttaagacagggtttgttaccttatagctctggctgtcctatataattcactatgtagactagcttagtcttgaatgccaagagatctgtctgagcttccctcccaggtgctgggcttaaagttacgcactgtcacactcaatttgtggaaatctttaaaattttattcttgattagtagacatttaaatttttagttgttttttgtttttttttcttttgctacatattctaagctaccttttcctttaaaaaagttttttggtaattttattgttctatacttactcttttgcatttattttgctttctgttccttttgagacagtgtttccatgtaccctgtgtggtctggcatttaatagagaccaagctggcctccaacttgtggcagtcctcctgtctccctctccacagagctgagatgacagacattgccaccatgctcagttatacttttattcaaaaagacattcttcaggagtgaccctaccgtctacctccttataatgacgagtagcagatgtgcagaagagtggacgcactccccatgccgagtgccgtgcagccctctatctgtatcagctaatagtgacagcagggtctggtagggcccgccctgtctccgttcacagagggcagctgcactggggtaggcggcttgcccagggccctgcagctaggcaggtgtggaagcgggactgctgcccatctgtacatgcagagcttactacctgtgccttatctctacgagagctttctgaaagaacatggagtggtaaaaatcctgagctggaaaaatgctttggttcttcccctggtttaaaatacttttgtttaaaaacttgtaatttccacccagttctgcctcctgagtgctgggattaaattacaagtcttcttatacaagaacttaaacttttaagaaatacattattatgtaatgaaaaattacctgctcatcagctgcttaatttcctgttcataacctctgttatttattacatatcctttatactctggactggagcattttgttctgtgatttaatcctcacagtaacccattgaggaaggtcaaaattcactccagcgagtaagaaaatgaggctttgtttgcacatccaggtcttgaggttgccatagtgatggcctgtgtccttaagaatgctgccttgccttggaagaaaatagaaggacctttcttctcatggtgggatagtatttcagaaggagggcttctcttgtctggcatctagcaggtagtgtccccctgggtattggggctctggtgactgtgagccatgccgttactcacccgtgcctcggtgcatttcctttgtggatgagcatctgcatatttctgtccacaggctttggatgcctacagacttagagcgttcattgagtgcctctctcttcccctgagctagatgctccctaatactttctcctgtgtttgtgttgctgtttagggagaacaatgtttgtgacataaatgcagtgcatggcttgttcgccacaggaacaatagaggttagtgcgtgttcacactgaaacaaatgtgtttcatttgttgacagtttcagtttgtgtgcattccacacttgccactgtgcttatatagagataagaagacaacttactgtagttggttccgttcttctgtgtgagtcattgaactcaggttgtcaggcttggcagcaagtccccttacccactgaactgtttttcatttcaaaaaagattttctggggtctggagagatgactcagcagttacaagtgtactgttgctcttatagagcacctgaatttggtgtccaccacccaggtagagcagctcacaacagcctatgacttgagctctggggatctgagatcatcttgccctttgggcacatgcacccacagactcatacctatatagagacatacaaatatatccaattaaaaatagagacctgcctaacattgtgggacctaggtttggtccctagtggtgtctaaattcgtgagacaatcagatagtcagtcaaaccaattaattaatcaatctttagcttttaatgtatttaagaaaattacacctttagacatgttgaaaacagttcagtgatagcgtcccacacattcctttttaaaataaacatgtcattttctaagaggttttctaagccatttgaaagtaaattatgaacattaggacacttcatgcctaaatatttgaaatacaatttttaaaaacaaggactcaagctaaggatggtagaccataccccaactcttggtagtagatattagagaattagaagctgacggctagccttgtctatacagtgagtgcaagctgatcttggctataaaagtctttgtctcaaaaagccaaaaaataaggtaggcgtggtgaagcacgcctttaatcccaatttgggaggcagaggcaggcggatctcttgagttggaggccagcctgctgtacagaattgagttccaggatagccagggccacacagagaaaccctgtctacaaacaaacaacctcccaaagctaaaaaagtaaaaagtaatacagattaaagaaaagacctatccaatgatcttaactactccggagactaacggaggaggatcacttgagccctggaagtcaacggtagcctggatgacagtgaggttcttattcaaacaaagccataaagacctttttcataaaatataaatgtcttcttcccgtggagccaactcaagggtcatgtgtctagttgggacttcttcatttttcttaattatgaagtaaatcaccttgtggtgaaatacccgacactgcctgccggggttacaggttaaaagctgagctttgattctgtatgctggtaaatgttcaaaagttttctagttacacttttacttaaaatgtttttttcctctgttcagggtcgagtggaatgctgggatccaagagtaagaaaaagggttggcgtgttagactgtgcattaaatagtgtcacagcagattcagagtaagtagcaatcaatttgcagtataagtgtcagtcaaccttctgatttaagtcagcgtgtcagtgtgaaattaattgccaaaggatgaactcttttctgactcacatctgagactggtgtcgggcattgttgtcctataaagctgtgggtaagccagggagattccttctctccagtacttctcagagcagcgtgggattttagttttcattcccccaggattggtgactgggcaggcgtgtgctttgaatgctatgttgaaggaagcaaagggtgacgttttctttttttttcttgttcttattggtctacacttaaacatttagagagtaatacatacttggagaggaaaaacatgtgacacaggtagcagcttgagtcaagtaagaacgagtctttgtcatccactcaccagcatgggctggcacaggttggcacccctgcccaggtgctggctgtaggcagaccaccctcaggcaggcctttgctccaggcttatctgttcagaaaagcctttctctgggcactgcttctccagcacatcccgtgtacttcagggagagtttatatacttcatgttggagggtaaagcgtctgatggtaacaggctgcaatgacactaaggaccctaaaatttagtgcatgatttcctttagggtaggaactcataactcctttgaaaagatgtttacatggaccatctttgattaaaaataataaagaatggctcagctgctgcagctcagtaggagagtgcctgtggagtatgcaaggctgcagggtcaaccttcactattacaggagcagcaagccagtgtataacgaactaatgatacctctttctaatacataaatcttactctgtattaagaagtaaacttgcgtgtttgttttaaactgctacatttaaagtgacaatagagacattcatttttcttgattgctttggggtttattttaaaatgataatcaacttcactaatcatggcatggtgtagaggatattaagaaactaagctaggaagttcacttccacatagaataaactaatgcaaaaaatgcatattaaaggttttttgtttttgtataaggtgtgcgcctgtgcatgggtgcagatgcctaaaaaggccagagggggccactgcatcccctagaagcagagcttgagttacaggcagttgtgagcagcttgtgtgggtgctgggaacctaattctgctcccctcagagcagtttgtgctttccctcagagccagctcttcagttgccacattgttttaacccatcagtgttaaaaaagaaatcaggaaatatactaagaacaaaatactaaagttactcattctaattttctctcactcttaagcattgatttgtctttgaattatgtcaagatgtgtgctctgagttccgtgtgcccttagcatcacaacctgactttgtttctctttgttgttgttgtttcttgtttttctcttatgaaatagtctcactccagcactgcctggcatagaactctgtatacactgtgctggcctcaaatcacagagatccacctacctctgcctcctgatgcttggatcaaagttgtgtgcctaatgacttgagttcagtctctggatcccccagaggtggaaagaaagaaccagtttcacagagttgtcctctgacctctgggtacatccctgcgtgtgttcgcccaatcctccttttgtttttaagatttatttatttatttatttaatgaatgtatgggagtacactgtagctgtcttcagccacaccagaagagggcatctgatcccattacaaatggttgtgagccaccatgtggttgctgggaattgaactcagtacctctggaagagcagtctgtgctcttaactgctgaaacatctctccagcccgctttgttttgttttaaagcaaacagatgtgtagtagtcactgataatacatctcaaggctatttccagcataagtgcagtgactataggagatgggatactacacagtattaaggacaaggatggaaaaaggccatcttcactttggtctttagaagtaatgggagtactgtttttttctgtttatgattttttgagacagtgtttctgtgtatccctggctgtccttgaactcactgtgtagaccagactggccttgagctgggagattgccctcttctgtctgtgctgggattaaaagtgtgctcctcatttgtatatggttgaaatattggaatttggggtttttttttttaatgaaaattgattcacattttgtactgatttttttgttgttgttgttgttctttagaggtaaggaattttcagctgttgtgataaaatattttgaaaataattatatttagtataacaaaagacactaagcagtatccgaaacagaaagaatagcagagacccacctgctgtgtagcagaatttggccaaccagagcctctgggaacatatccaatgtttgtagttcagtggttatttcccaagcatctagaactgagtttttgggttcctgctaaattgttttacagaaaacctaatataaatataagcatctaccaccttattgagtggccactgtctccttgtcctcagctgaggctcctccccagcatgtcctcaccattctttccttttcctcctcctccttttcttcttcttcctcttcttcctcctcctctccctcttcctcctttcttttcagtttattacatttgtttgattgactgattttgcacgggcagggcacacccatgcatgtagaggtcagagcacagctttgaagtgagtcttctttccttctccctgtgggtccagttgtcaggcttgggagcaggtgccccatggttggcttcactgagccctctgtctagctactgttagttcttgagctaggctctcccctgtccatgtgggctgttaactcctgggtctgagggagtctcctgggtatctggtatattgtagacacacagacacctctcccaatttattgttattagaaagaacagaggtagcagttaactagagctacctgactgcttaacaggtagtgattttttttctctttttatattaaaacatacgtgtcaggctgccttcagacttcctgcgtggctgagaatggccttgcactcctaatgcttttcctcccaaatgctgggactgattacaccaccctatccctaccttagtactggatatttatttaccagaggctttggtgagttctttatgaacagaaagtgacgtcttgttaggtactttaattttatgtgttttatgaaagaaaactctccaccaatgacatactcattgttcagcttttgagaattttgtttcagaagtatgttagtgtagggaagggtatataaatacccatttttagatatatacctttcagtgagaaagaaaaacatacagttgtcatagagttttattaaattcttataacatttgttttgttttgttttgtttttgtttttcgagtcagggtttctctgtgtagccctggctgtcctggaactcactctgtagaccaggctggcctcgaactcagaaatccgcctgcctctgcctcccaagtgctgggattaaaggtgtgtgccaccacgcccggctcttataacatttttataaaaggacaatgaccatgaccatatgtgtttattgtcatcagaagaacatccagaagcataagaaaatgttaaagattgctggtttttcttctgctgattttttcaagtgatcttattgtattgtattttttaaagatttatttatttttaattacgtatgtctgtttgtgtctgcacataagtacagtacccatgaaacccagaagagcgggttgggtcctcgggaactagagttatggatgggttcttggaatcaaaccctggtcctctaaagagcagccagtgtttttaacctctgagccatctccctagcccctgtatttttctttttaatttagctttatgcttttcctacaaaccttgtagcttgtcacttgtgttatttagtaagtttagtaattttagtaaagctagaagtactggatagagcaggctgtctttcttttccatgattgactgtctgcctgagaaagtcagcagacttgcctggaagccagggagaattaataggagagttacaggagctggttaggaaatgaatgtgcagaagtcagtgaatttggtatcttagcaattccccagaaggaggaggaggaggtggcagaaaagttctcataacataaactacaattattgaaggagtcattaacctgtctgaagaaagtgataaaattgccttatgaaataagcctgggaggagtaggaagataattctgtatgaacaggtattctgaagttcattttgaagagtaggtgatggagtctgaggagcagcagcctctccagccgctgctcagtgcagctccaggctaaggctgtaggtggcaggagaggcttgctagtgctccgggcatggtctggccttgaagggctgggtgcagagctggtttctacttgttgttgcgggacatgatctcactgtgtagtgtacctcagcctcctgagtgcagggattgcaggcaggcatcagcacagccagctctggtctacttctgacctaatctcttttttctaccttaatgttttggcgctcgtgtctgtagctggtgcatgagaagcacgtatagaattgtagccgtaccttttgttcttcagtaccatcgagatttaggtcttaggcttttattttagatgaatgaggttgatctattttatttttaaaacgatttgaaattttgaatatgtgtgtgtgcccatgagttcaggtgcctgcagagagcaaaggtgtcagatctcctgagctggagttataggtagttgtgagccacctgacttggatgctggctggaattcaaatttgagttcgttgcagaagcagtgcatgttgttaacaactgagctctctctcctgccttggtgaagttggttttacatcagaagtaagcatacccacccatatcccaagataaattgtttctctgagaatgatagggatgtttgagggctgggaagatggctcattcaataaagtgctagctgtgaaagacatgacttagtttagatccccagcatccatataaaccagtcactaatctcagatctggagagatggagacaggaaggtccctgggagtccctgaccagcaaactccagaatcactgaacattctattccaaagcacacatggatcgcagatatctgatgttgacccctggtgcccctgcacacacacggacacacacacacacacacacacacacacacacacacacacacacacagagggagagagagagagagagagaaagatatcctggagaagtttctgaaaacagtgttctattatctgaatagaatggaagatgaaggtgggttatgggattacatttgtgtgggaaatgtcttttttattatgaaagtttggatagagttataaacaaatagctggtaacatgattttccttgttagatttgaagtgaggacaaacacttgcttttcaggataaacagcttacccaccatctctgcattgaagtttaatggagccttgagcatggcagttggaacatccacagggcaggtaaatgtcacatgtgagcatgtgagccagtattttggatgtgtattggaaggcacttggatagtgagtgaggccggagtggagaggtgctccagactactaggtccttttagcacctcagaagatcggtctagtcctttgatgttagagttgaatcgaggtagtcttcagacattcctgataggggtttggaacagtattttttagagtgtgtggcccaaatttgggattctaacagctttctactcttggagagtcacagtggatttaagtacatattttgaagaccctgggaatcctgcaagtaagaattgtgttcactaaatatttccaagatgtgtgcatgcaaagagccattttttttctttttcttttgagacggtcttgacatacaatgctagctggcctagaattctgtgtagaagaggctggccttgaactcacagagatctgcctgtctctgcctcccaaaggcatgtgccacaatgcttactcaaggtcacttgttgcagcagcacctgctgtgtcctaggccacagatttgctaattaattagcaagcaaaacattcttatgaatatctgtccctttcttagtatagatcagtaattatcaaattagtggatctaaaaactactcccagggttaaagtcataaaacttccaagagctgactttagtgttaggctctgactaagtatgtttgtcatgttcatagaaggttatgaaataggtggcagtcattattccaacttttttgttttttgtttttcttcatgtgtatgtctgtgtatgaggaagggaggggtctcttataccccatgatggcttcatacttgatatgtagccaagaatgactttgaattcctgattttcttgcctccataatcccaagtgctgagactgctggcatgtgccaccatggctggttttgctgggctggggaatggacttggggctttgtgggtactgggtcagtactctagtagctgagctgcctccccagttcccattactctgagtattaaatgtgtagtttggaaatggcttgtttgactagaattaacttttctcttctaggtgttgttatatgatcttcgctcggataagccgttgctagttaaggatcaccagtatgggctgccaattaagtcagttcatttccaggattccctagatttggttttgtctgcagactctagaattgtcaaaatgtggaacaaggactccgtacgtactttctgctgcagttgctctctgttttccttgcctgttcccagtgcttctttttttctgtgtgctttggcagctcctgtgggtccttgagaagggggtgctgagcagccatctgggaaccagcatatcagtcactttaggtcagggtgtgtctgtgctggggcaaagctgacctgcgctggcttcagttacggagcatcctgatttatgtgcacttgtgcatgaggagggcttggactcaggtcatcaggctggtggttagggcttttatcccctgagcctagttgccaggcccctggcacacattttattggacacgtgttagatggagagaaagtcactgtgaaatagaatctgcctctgaagagccttttggtcctgcccctaccatcttgattttattttattactactgcctgtgagaatggctatgtgccataatgcacatggaggtcagaggacaacttggatattactcttccaccatgggttccagggttgaattcaggtggcacagcaaacactttgacctgctgagccagcttgctggctccatcctgagacctttcagctcactgactaccccagcagagttctgggagctgctgattttcttccattctagagtcagtgcatgtcccagattcataccctgtccccatctcaaacaagcagggtctagaaatagtaaggacatagtaattttgtgtattggtcagtctgtctgtctgcctttctctggtggtaattctagggattgaacccaggtccttgtgtgtgcttagccagtgctgtaccactgggttacatccttaatgttctttgtactttttatttcaagagagggcttcagtcagttacccaagttgaccttgaactcaccctaccctaggcagaccttcagcttgtgatcctcctgcctcagtctccccagttggtagtattacatgcctgtgcttcaaggcctggctaactttgtttcattttttttcaagtagtgttttcttaagaatattttagtgtttcctccaactacaaatgttattttaaaagtactgtttggattgctgattttagtctgccttctgctttcacttcatgtatgtaaagttttttttttttaagatttatttatttatttatttgctttctttatatgagtacactgtagctgtctatagacacaccagaagagggatcccattacagatggttgtgaggcaccatgtggttgctaggaattaaactcaggacctctggaagagcagtcagtgctcttaaccactgagccatctttccatccgccacctccccccgaacccccagttgttttgttttttttttttttttccattttttattaggtatttagctcatttacatttccaatgctataccaaaacccccactcccctgcccacccttgtttggttttaagacgaggttttatgtagctcaggatagcatcagatttgctgtgggtcccaccgtgcctgggctctttttttttttttttttttttttttaaatttgagtattagctggatgtgatggctcacccctgacatctcagtacttaggaacagaggtagaagatcaattcaagttcaaggctagcctgggctacagtgagacttgtctcaaaaccattttgagaggactgaaagtaactttattacgtcaataaaataaattcagtacagcaaattacttctcttactctcttttaaagatggaaaaaaaaacagttttattcatgtgtaagtgtgtatctttgtgtttgctacattgtttaggtgacctcctgggagcaggaattacaggcatttttgtgaattgccttaaccagggtggcgtgaactgaactcaggtcctttggaagagcaataagtgcttttaactgccgagccatctctttagccttacaaactcttaataattttgatttcaataaacacattaattctaaaggctaaagagtgaaggtaaaaacagttctgagaagacgctgagcagaaggcctatgccctcctcactcactgcctggagtgggtaccgggttctacaggcacctgctgtgtttggtgtggataatggtgggtcaggcacagtccagccacctgtcactttggcttttctagccagtacttttgagttttttaaattttgcattttggggctagaaagatggctcagtggttgagagcattgactgctcctgcaagacccaggttcaattctcagcatccacatgacagctcacaactttttgtaacttagctctcagaggcgcagacgccctcttctggactttccaggcactgcatgcacattttgcataggctaacaactcaggctaacaacactaatacacataaaataaaaataagttctcaagattttatttctaagtatggcagtttaatctccagaagtggtgaccttactttattcctttggctctgtcttgagatgtatccgttctagttactgtttaacttagcagcggatgaccagctcacggcattcctgagttcttggaaacactaccctgatgcttacaggagttaagcattctgcttggtaggctttgagtttgagggttttgaggacttgtgggagacttttcatatcttagatcaataatttttcggcaaccctaactaattgatagaaaaacactatttccctatgcagagtgtacttgcacacttctacacttaagaggctgactgaggcaggagaaccaagagtttgaggccagcttggactatgcagtgagactctggatcaaaataataataataataacaccaccaccactaatcagttgtcttactgtttttcattgtataagtgcatacatggtgtgtaattagagatagtttgactttgtagataaggcttacctggaactcactatggaacccacacaagcctcaaactcaccatcctatctctactttctgaatgttgggattatatttgtgtgctatcgtactagctcgtatttccaagaactcccaagatagtataaaggtgttcatttgacctggctcccatcctacctaagcctagcagtagctccatttggatgtgtccttccagacccctttatgctatgtttcccgtgccctgggtttctgggaccaatgacccctttgtctcttttgatccatgctgttgtagttcttgttctcttcctcttttctttgccctctccttcccacttcagtgggagcttgctaggcgagtttcactgttgaacaagaacttggctaccttttttcatcaacctcgaaataaccatcctgcctgggcttcagctccacccacttctgccctgggtgcaccacatcctggtgtcttctggtaatgacttatcgctgcaagagctggcagaacttgtcagcatccccatttgaagacatcacactgtaattacagcaatcaattttattttggtactttttgtttcttaagactaagtgcttcctcttgactaacagattacctggctttgtgtgacctgctttccttgtttctcttttttcttgtctttttccactcctgcctacctctgggccctcttcttagttttcaatagtacagtagatgtctctccacacttaaagtggaatgttggagccttcaccatatagtgactgatgctccggccttacaggattctgggttgtacttggttgtctctggggtttggtggcactgctacatagcttccctttaaccctaatgtcttctactgtgccctagcacctctgagactttgagtcttcttctgttttgttttgaacaggtcaattcatttctaaaacaaagccgtctgatatgctgataagacagagaagatttttgagtctgagtcctttccattagcttctttcttttatgtggcactatctgggttgtgtctccattttattttctctatgtgccattgctaaaagctgtctttgatgatttcagtaattcacttttgcttactgttttaggggaaaatatttacttcgttggagccagaacatgatcttaatgatgtttgcctctatcccagctcaggtaggctcacgctcctgcgcttgagttttaactgcgtttgcttcataagatcacacttgattgctcaggacagttcttgagtttttcatctacttggaagaagaaaggacaggaagtggtatggatgattcagaaaggcgctcatgactcagtactcagcccgcctagctattagtagaaactagtaacaaatgtaggtaggtggcaggtgaaatgctattttggtgtattcttttatgtgattagtaatggcatgtggaaattgaggttagagatttgaaggaggatggtaataaaggtttggagatactctgcatcaggtactgttcagcaaattatatgataggttttgaaattcagcagtaccttcagggcagctctcaaatggggtctgagaaaagaaggagagagccctcccactctcaagccctgtcctctgttgacggggtagagaggaaagcctgacatgccccactgcacacatgctggcagtactgtgccagcatgtcacagggagtcgtgagccagagctgggggtggggcggaggagcaggggaggctttcagggtcttatgtggagggcagtcacggaatgggattggagtggctttgtgggtaaggtgattcaccaagaagacaatgtcagaagagtaacagggtcgtgggagggctgaagggaaaggacaggtgggtgcaggtggtcacctgaccagctgggctccatctgtcaccagagggcccacacagataaagagtgggccgccttagaactgcaggacccatgaaatagtgtcctgagttgagcaagccagcatgtgtgtttctggcatttacgtattaggcattgacaacgaggggtagtgatagtttgtcacagttcaacacctggtacaccgtaacgtatatgtctaggttagcaggtaagaatgttctgaagtaagtacagattgatcattgaagaagccagagtgggtatgaagacccagggggacataggagacttgaaatagcagaagccattccatttcgagcaatggggagaagagcgaatggatacagcagcatcaaagaaccatgtattactgatgctcaggtccagcctgagacagagcctgtggctttgtacctggggcctggaggaaagagcagactcactgctttgagtatgagtgagaaatacaagtctatcacttatcgtattataatcctgtgtataatcagtggcccagaattagttctttctatctggcttttgggtttgtttatttatttattgcttgcttgtttgtttttgttttattgagattctccctatatatttcagcagcttccctgaagcagtttcttgcccaaccaggcttcaaactcatgatcctctgcctcggccttctgcgtactgcaattgtgggctggtgacatcatatccagccctctgtcttgtaccacaagtggtcatagaagtagggtaatttaccagggttagttacctgcctggtataaggcaaggccttggttagaaccttctgaagtggactctagttacatgctcctagtggggagggacaggcggtggagggccttgtcatttcatttattagagttgctgggtcttatgctgatgagtgtggtcacttctgcaaagttgagggactcattgaggggaaggtgctgaggtattgaaatgccctcatgtggattctgggctacacagaagctcagtgagcccagtgaagtagtagatggaaaagggggaggagaaagattggtaggtgagggagaagcagtctgaaagggtggcagagagtgataaggggacttcactcaggaatataccccctccccccggcacaaacacacatttcctcttcctcatcgtgttaacttttctaaggtcagaccagtcttctggtagagtgtatgtctcttgaatatatgtggttgttcctcccggtgtcacttagcgtgttttctatcccgtgctgaacctaaagtagcagtgaagggttgcctgaatttagtagtgaggtcccccaacttgctagaattcagtaaggtctccctgcttgatgaaatgtgtttaggtttatggacaagccaggtgtggtggcacgtaccttaatcccagcacttgggggcagaggtatgtagcagaatgtgtgatcacactgtgaaccctgagagtgtgatatttactgaaaaaacctttttctagtggtcatgtggctcagctctttagcacacacctttaatcctcttggctggaatacagacatgccttagtacacacctttaatcctaaacaatgaaggtaaagctagtttgtagaaggaagcacccacagttgaaagtgatgtcttattgattggcagacaagtgatgaatcagagaaagatttgatagaacagaatatgcccaactcttatgagaagaaggaggaaagggaagctacttaagagagagtgcagagagagaaggcaggcagttttaccaggacagtaataaagagataggttgcagagagaatcagaagattagaacatatggccaaagtgagacgaggccaagcagggcaatttattaagaaactgagagaagctagcttgaatcagtcagcttgaagaggagttgagccagaacagctgaataggaccagccagccagagatcagaaggaactagaaagggtgagcttattcagcagtaagtctcagaggctgaaacattctaggtctagattagaagcttccaggactaggcctaggttagcacatggaggcaatcagcctccaagatgacaattacaccaggaaaataaaaattacttttatagaggtcagtaaatctcttgaatttgaggccagcctggtctacagacctaattctaggacagccatggctacacagagaagccttgtattttggggaaaaaaatcatgaaggcacctcaagccaagctgcaggctctgcatgccaagtatcattccagcagatcatccgtgtgagccaagctgcaggctctgcatgccaattatcattccagcagatcatccgtgtggggagggtaaagttggttcagtgtgttcaggaatcttttaccatgtgtagtttggacaaggaatggctttttctgtcaaatgacttagagaagtacgccaggcaggccaataattgtttcgcaagacagtgtgtgctgccctcgcaggttggcttgggctccttgctgtgctcagaggttgtgctctgcaccggctttaccgtacccatcttccctccactctgtgctttgtcttcatcactgtgtgcttaaccatagtttagagaaggtaaaacctcattcttttccacacactcagttttggaataattcagacctaatcatggcacatgtttagtaatagtttctttgtacttgtaaggcagctcagaatattgagaaatgattttgccttcctggcccttacctgactgcttacgtggcacagtttcttacatggagcagccagccattctgcaggtcagggcactgccagaggcagcacagctctgggacccagtgtgcatggtgtgacgacacaggaagcatgtaaagatgacacatgtgtgagtcgcaccccagcctgttaaagcaggtccagaggtccagagccattggcagaagggaagaaggtgggctttggacttaagaaagacctgcttcaggcttaattatgcccattatgaccctcagctttctcacccaccaagagagagctgtaagagaccagcaggactgtggaaaatgtcatagctcttgtccctgtcagcatcctcccacagggtggcatgaggaacaaccatggggcatttgcacatagcactcacaaagtggagtcttcacatgtcagtgagaagctgaagatgagacacatgtgtccctgctgcccctcttcccagaatgtctgccttgagccattgagagtgctgttgaagctgtgtgttttagtgtggtgcttttcaaacatggttggccagccacctgcctatagccttccttttcatccctgtgattgattcttttgtacattacagtcaagatgaatacctagcgaagtgtaacgctgcctgtggttttgttctgtcctttcttgacactgctgtgttgagctgctgcctacaagctttaagttccttcctttctgtgcttttatcacccagcttggtagcggattgcagatggttcagggagctcccccctccccgcccccccagcagacctgccataaacactgtttctggttttgtgttttgagtgttggtgagcctttctatgacatacacccagatgagttctgattcagacatgtgtctgaggagggcactgctttgtcagatctgtcaccactgacactggaggagagtgccttggactctagttgctgggcggttttccttctctgaaaagttttctctgaagagcaataagcagtagcatcttgagaaacttagaaactgctgttcgtaacgctgccagcgtcctcaaaaaccactgctgcttattagaaaaaatgcctccgttaactccatgctcttaagttaagtggcctttgtgctattcttggaatcacctttgctgtttgtttgacattatgttagaagcatcaagaaggtgagccagtagatcccatgtagacggtggaattcttttttcattttgttgggtggtatttagactacttaatggtttatttgataacataagaagccttttctgttttgagtggaatttttattctccaaattatatggggctggtgagtttattttgaagggtgccttgcttgctgagatcatgtacaagcttataaaggatcctgaattacctgtaaagggttggggagatgtcaactgatattgtgtgtagtcatgagagggttggctgtagaatatcttgccaccttgaaggtgcttcagaaaactttaggaaactatagttaactaaaattaatttctctagtggttcattcttttaaaactccctaaaatgatcatggcattctaagggctgtttagtgacatatgggtcttaaaaatattttatgtgtgtgaatgttttgccaaaatgtatctatgtgcacaacatgtacagatcattgtgaaccatcaggtgtgtgccaggaactgaacctggctcctcacaagagcaataagtgcttttagccactgaaccatctctttgaccctgatatgtgggtcttttgaggtaagttctatattacactcctataatcatttcagtctgcagtctgctgtgaagtttaatgcagaaattctggtgctggaccttttggttccttgactcctgattccaggaggggagcctttctctccattattattctcatactgtacatacatatgaagctggaaactccccagacctagtatagagctgagtgcctctccggagcctgctcatggctttagctcatcaagcctgggtagttcacagacagggatagcagctcccacaactgaggtctcttgcctaaaaggcaagactggcgaaagggcagctcaagcattttacattttgtagaaatgagtacttctcaccacttgtttaatttgttcattgtatttatttttaggaatgcttcttactgccaatgaatcccccaagatgggcatttactacattccggtaagagcacagcaagtttttgtgtttgaactggtagtgttgacagcccttgggctctgtgtagctttgctgcactgtagattcactgtggatacagtgtgttctgtggcccagtagagtaatgtctcagtattatgttggccaaatgtttgtgctgtttagcataggcttgaaatctagtaatcttcagatatgctttgttgtttgttttgctgggaaatatttcagaatctagaacttaaaactatcaactaagcagaaatctaaatcaaaactaagagtctagaacagtgattctcaaccttcctaatgctgcgaccctttaatacagttcctcatgttgtgatccccatccataaagctatttttgttactacttcataactataattttgctactgttatcgtaatacaaacaaatatctgatatttatgtaatgtaaatatctgatattcgacccctgtgaaaaggttgttcaactcccaaaggagctgagacccacaggttaagagcttgctggtttagtgttcttctagttacctcactatagtttgcatgttttagaaataagttacacactcaagaagtaggatcatcaggattatcagcaatgacatatagtttagattatcatattgtcattcttaaagaattgttcttctacaccaggagcttctgtgctttaccttttggtctatagaaggagagaaatggggatgtgttctcttagtcagtaaggcagccttcatgtagagctggcacgagtgacgggtgttaccagtagggagacttgagagcagtgtgggctctcactgctgccagcctcccatcatggaagtcttggttggagtagttgggttatctgtggattggttttcaccagcctccacctgctgctgagtttctgttgtcttaggaggctgatgctgcagtgctctgtagtgtttgctctgagtgatagtaaaatgaaggctgttcaaacaggaagctgctgttctcctctattgtcaaatgctcctcttcccagcctcacgcatgccgttttacccatcttcccacgtttttgtggctttataggtatttgtttgttgcatcagctgtgtgccaggcactgtgctagatgctgcagcacacaatacatagtatattagcattgcttcatcctcaggattaaaacgggaagaaaggtggtttcaggtctgcaccatgagctgtaggaggaggactctttgagagtgcctgggaggagagacccttcctccagagtgggctaggtgcctgtgagaaactcagtaaactacccagagtgactttggggagagactggagcttgagtctgtagactaggtggaaggatggggtgagccacagaatgggagtagcatcgcagccgcaggagagtgcctgtggagagcgcagggagagggtctcatggagcagagcaagtgccaactgggaagggtctggaagtgtgtgctagggaggcgtgagagcctggcccatcatgagcagcagagtgaggaagccagggctgccctttggaaaggttgtttgtctctacaaagagaatggcatgggatctaagctggaaacagctagaacaggctgtggcagtctccacgagggaaggcagtgctaggctatacttttcagcatcaggacttcggtaggtcctataaataaagaaacaaatctgactcagagttaatgtccacctgtgaagatgcaggtggactataagaaaatgttcctcttgctcgcacctccctgtcaagggtagtctcttccttctccccagggcgtacttactgtacttttgagcagctagtgccacatcgagagggaggctccagagtacagggtggtatcagagcggacagtacaggccaagagcccgtgtgccacgtggcacagaggaggcaggtgtgggtaggaagatagacttggtaataagtttaaatatgggttgtgaggaagaggaaagaaacaagggtgactccaggttctgccagggcacatgtgtgcatgctgatgtcatttccatccaggaagaggtgggtgaataataaaaatattttccttttgatgttttttacattttgaaatgaccttttgcagaaatggcacaaatgttttaattacacaaataatatatccatgttcttattttcagtattttacaaagtataagaggaaaaatgcatactctgcccccatagatactattcatatttggaaacactgtctttcctgttacattgttaaatatgtggatttgatttgatttttttaatattcagttttgcttttgtgtgtgtgtgtggctgggtctcttgcagcccaggctgtccaggaatctgctgtgtagccaatgatgacctagggctctcctgatcttggctttgcctccaaggtggtgtgctcgactatgaatggggacatggtgttctataagtaaattgtatccagtcctatagaatcgatcttaggtatagtaactccaacatagtcacctaaagctagcattcacaggcactgggtttaatacctaacactggaagggaaaaaaatcacctaaaattgccagacacattgggtatacccatgactacagaattcgggggcaaaggcagtaagacagccttggctacatagcagtcatttccactatattgcttcttttttttctttttcaagatgggatctcactgcctggccaggttggcctagaacttgagctatgtagcctgtgctgcctcaagctcttagtcttcctgcctcagcctcctcccctcccctcccnnnnnnnnnnnnnnnnnnnncgataagtcattaccagaagacaccaggatgtggtgcacccagggcagaagtgggtggagctgaagcccaggcaggatggttatttcgaggttgatgaaaaaaggtagccaagttcttgttcaacagtgaaactcgcctagcaagctcccactgaagtgggaaggagagggcaaagaaaagaggaagagaacaagaactacaacagcatggatcaaaagagacaaaggggtcattggtcccagaaactcagggcatcccctcccctcccctccccttcccttcccttcccttttctttctcccctcctttctttcttattttcttttggggggtggtggtggtagttttaagacagggtttcaccgtgtgtaaccttgactgtcctggaatttgcactggcctcgaattcacagagatctgcctgcctctgccgccctccaccccaatgctgggattaaaggtgtgagtcaccaccatcacccacctctccctaggccttctatagtaagtaggattgcaggtgtgtgtgccaccttgtttggtttctctgttgtattttattgctgggcatgtgtgggctattttaaaattgaggagaccgcttacccatgtaattctttggttctgttttgaggttgcgtgctcctttcctgtcctttcttgcattgggcatcacaccagggctttgcacctcgtgctggctaagcactttgcccccaaactgtactccagccgacagtaggggtttgctattgttccaagggacagcaagagcaagaggagctatggtggctagatgatgagaaggtgctcttgactcacaagcctgcctcacaaggcccctgagttccagcttagtagctgagatttgacaggcagatatgaaatgggcccaaagcactctcccaggtgctgcacatcagggaccagtgtgcacaggtcttgctaggccgagtgctgagctgcagcttgccctctgctctccttcctgaccccacggtctgcctgccactcttgcaccaaatcatattctgcagcaccgtttgtcttcacttggcacctgctctttttactgctccttcaaagcaaagagcaagccccagggctgaaagcttgccatttaccggaagattaatatcaaacttaaggagctgcatttagctcgtttgagacctgtagagctagagaactgtgtgtttaatatgtggcttgtgccaagtttaggaggtctgacctgtgatttgtacgaacatcttataaatcagtacaggcgtcccacacatccctgcaggctgtgctacagaaaaggcagcatgttgttctcttagcttgttcgtggttgcccttctagccgataccatctttcctgaatacttggactctctggagactaacacagttcctgactttagtgacccgccccttacataagctagggagaccaagcgagtgtcccctcatcctcatcccactttcccagtcctgtcctttgttctctttcaagggagttgcatttgtttcctcacttgcttcagcatctaatttatcagtagattagtaatacagggcaagaacagctctgactcagtttcaggttagttctgcatagtgaacacctttgacaactgcagactcctgagggaatccagccatgaaattgatactccaatgggaatgctccggatgttcaaggctctgagtatagcaagttcctataagttcctaggctccacagccaggagcccctgcatccggagttgcctgcatattccataatggatgtacatgcttatcagaggaaaatgtattattgttttgaaagatgtttgatttagaaaacaaaataactgagttacttagaggtatatattttcaattttgtttgaaatgtaaatttaagctgctataaagattatatgaaatgtcatttaacatacctttcaatcctggcagttactttatttcaaaatagtttattagaaaaaatattctatattttctgtattttgattgctaattataaatcatcaaaatatactgacaaaatattttaacatctactatttaatttaaaaattggaaggtatttttggaataccttgtccctacaaatagggcagattaaaagcatgaaggatggggtaggggtgctagggagatgattcggttggcagatgcttgctgtgcaagtctgaggaccaaaattcggatccttagcatccatataaatgccaggtgcagtggtgagtccctataatcccagtgctggatgcagagataggcaggttctgagaacctgcagccagccagtccagccagaaactaaagctccaggttcagtgagggactcaaaaagcaatgtggaaagcaacaagtgcatacctgcagtgccctctgtcctttatatggctgtgcactcgcacacatgtgcacgcacacatacaatcactagtagtaagaaagcatgcaaatcttaaaaacaaaactaacccaaagactgttgtctaacctgcactagtgcttatggtaagaaatgacatttgaacttgagcgaaactgatttggtgcatagaggagacaggatgctcagcagcagagccttgtctcagtctctgccatacttggatattaaccctgtcccgcttacaagtagtatgcaaatactttaaaagcagcatctccactttcaacttttgaaggcctgaggctccatctttgtctgtgatcacagcacaaacctgggtctgtatcgtaaatgcctggaaacataacagtagcagggtaagggtggccagggtccaggctctgctcttcctggacagccgggtgtacaggcagtcaaattccctcgactttgatatgcacgtcatgtgcacatcagagttgtcttccatggtgactgtgactccgtgcagctttatgttgtatgtaacactacattcccctgtttggccctttcattctctgctggctcttctctcccattgatgtgtcccagggcccgggtttggctctattctctccctctaaaggcgtggagagcctgcctttctgtttgaattcactccttggtagctcgttgcctcatgctttctgaccagctaccagattcctcgccagccttctcctcacctgatgtatgtctgctctggtctcctcagctcttccacttggatgtctcaactgcatgtcctgtgtccatgagcgctacctcagcagtagccctttgcctgcccgtgcttggctcacaggcttgccttgacctcttaattcaggtttctccttttacttttgtcccccttgccatttgccttttgtgttgttgttgggttgggttttgttgttgttgttgttgggtttgtttgtttgtttgtttgtttagcaagggtcttcctgtgcgatccaggcagttgttactaccttggcctctagtgttctgggatgttgtgtttgtttgtttgtttagcaagggtcttcctgtgcgatccaggcagttgttactaccttggcctccagtgttttgggatcatattgcacattcccatagctggctttgcagtctgtttttcttataacatctagattgacttaaacagtaaaaaatgcaaacagaacaagtataaatcctgtaatctgcttaaaactggttactagtccagtagccaacctatccatttgcccagagtaatgtcctaactgctcgcacagttatagatgttctttaaggtagacagaaaaggctagagaccagattccctgctgaaaacagatcttggtaagaaccatttctacttataggggtcaccaaatggtcagaccacattgccagctaagccagccatatattaaccaaaatgaaatattagagaggaatttgtttttttgggcaggtggtggtttctggtatgctggttggtttgttagcttgacacaagctagaataatctgggaagctggaatcttgattgaggtattaattgcctttattgggatgccataggcaaggttgtgggcattttcttgattactgattaatgtgtggtgtgggagggcccaacccactctgggcagtggtgacctaggcaggtggtcctgggtggtgtcagaaagcaaggcatggtgacacatgcctttaatcccagcacttaggaggaagaagcagacagattgatctctgtgagttcaaagctaatcttgttgagttttaatctagccagtgatacatagtgaaaccctgccccaaaggaaaggaagaaggaaagatgagggcagggtgtgaagaaaggaagaaggtaagatgagcaagccatgagggacaagtcagtaaacagcagttctccatggttcctgccctaacttcactcagccgtgggctgtgcttgggacgtgtaagcccaatgaatccttttctccccgacttgctttcagtgtttatcatagcagtagaaagcaaaccttgacacccagggattatccctagggcccgtgcatgctagccaagcactctgccattgtggtacattcccagctttctaaacagaaaaacaaaggttaagaacaaaagagcagaattctgctgcttcttggcttcatctgtggaagccaggccccatgaagcctggacaaggaaagtctactcatgtctgtctgtgggggcaagagacctccaaaactgttaaaggataacttttttaaaaatctgtaagtttgactcttacacatagtaccaaaaaaaaattgtgttttgttttgttttgttttgtttttttttttggaaaataacaacctattaattaagcaagggaaggaggcgtatttcataaccagaccctaagagaagtataggaagttagaagtgcacatggaataaagttacattgagtggagatgcacagaggcacagaggaagcttgtcagaagggaggggggacgactgaccaccagacagcttttggcattcgttttgggcagctcctggctacctgtgtcagatcccatcataccagagtcagacagtcttgatgctgtactgtatgaagaccaggggcctgtgacgaccagctacctgttttgtaaggtttctacagctaggacttaattccaaaggtctggtggtgattctgagtgtaggacagattggtttcatccttttcctggatgaaagccaagggtacggagcttttgctgtatgtttatcaacatttctgcaaaagttgctttgcatgtaaggaataattgctgctgtggtacatgtgtgaaaggccagacagggtctttgcttttcttcacgtatggacctgtgctattcactggagtttgtggaaattctgttgagtcccctgctggatgagccctgtgaagttgcttcagtgcaaggctcatcttgagcactgacttgatactccagagagctccctagatgagctatctattggcacagtaccatgtgctgaattgttgttactgtagtgtgcacgtaaattttggaaatgattgatgccattttcctttaaaaggctgattgaatctgagaactcttggatacagtaacaagtagttgtgttagaaatctctattttataggactagtagcaacatattcctttggtttgggggaagtagtgctataggccaaaaaagaaaaaggaaaaaaaaaaaaaaaaaaaccagccctatccccgagggactctgccagcaagcagaggatatacaagacagaacacaagcaagacaagtttctgctgaatgcctccttactacaggcatgttgggtgtgctttgaagggaggaggaagcttttgaagcccagaacagagagcaggaaggaatctttgaggtcggctaagccatcaccttgatttatagctgaggcatgggattatttgttcaaggtcagataaccgttcgttagcaaagctggagccagggtttctttccttactctgtctgtctcgcccaaggtaaggaaggagcttaggtttcggagtaggtagaactgagtgagtactggcctcaacactcactcgctgtcttctcaaacccgtttcctgatcagggggagagcggggatcccgccagagcatgtgcacaccgtgtgagcattttcagttagggcttgtcttttgctgctctccgggcacctgtcttggactaatcttgacctgggagagctttttcagcagagagtggtggcttcttctttccttcagctctgattgccaggtcccttcccttctgcatctaggacagagctagtgatgtgttgttcttgggagcttgtaggaacagccatgcagttctttctgtggtgctctgtggttgatgagcagcagccccaggacaaatactgtggtttccccacattttcacagtgacagcacattgggagggctctgggcatggctcatcactgggtgcgcaacacctgcttgtttagtgttgctccaactgagggaatgctccaaagggtttttaaggtttgatttggtttggttgtaggactggggatggatgctgggctcttatgcatgcccaggagcctgctacctctaagctgcagccccagtccttttcacacttcattttgagataaattcctactaagtgtccagtttagctctgcagtttagcaatcagtcttgctctgtggttcaggctgggcttaatctcaagattcttcctgcctcagtcagccaagtggctggcacaatagtgttgctggtctttgctactttataggttcttctttttctcaccctctatctcccctccccatttcacctcctatcactagataggagtgaaagaaggatatggggaagagagaaagatagagatctctgaatctaatttctattttcttgtttcttctttgcttgtagctggtctttgctactttgtgggttctttctttttcccaccctttattcccccccccccccgcccccaatccttggttttaccccctatcactggataggagagaaaggatagagagacatagtgagagagcaagtcatagctgctacaaagtagccttctatcctcactcctgggattaagagaaagcattcttactatatttctgtgttttgttttgttttgttttgttttaagaaaccaaaattctagagttcattacacataggtctgtgctcccagaattttctttgtgagacagggtcttactacacaccatagctctagagcctcctgcctccaccttcatcttccaagtgttgagagtacaaggcatatgctaccacattgcccatgacattttaagttaattttctgttccatttgattatattcaacttgaatttaaaacctgctgtctgtgtaagaatttaaaacaatgaaattgaagctaagaaacatataatgaccaaaatacaaaaaggagggaagtttataagatatagttagaaaatttagaatgggcaatgaagaccacatctataaaaaacaacagaagactttgttcagctaatgaagtccaagagcctttgagacacctgtgtacatgggatatatgacagaggggacagtgaggggttctcctgaaagtctttgtattcattgagaagtttttctggtagttatagattggtgaaatttagaagttcaggaattatcaggtataaccattctcagaaagcatgttttcatgatgtaaggaaaagtgagatcttaaaggcagtgtgtgtaaggtgaggcaacaccaacaaactggactaaagcagagatctgccatcattgagtgtgtaggaagagccctcgggtgtgaggacagacacatcgaagctgccagagctaagagaagtgggatttgagtgaaaacatggtgtactctgattaaattcagatttaaatttagagacaggtagtttgcagatgtcatcaaaggatgctgcttaatgttcacctacaggaagggtggagaaggaagctgggtctggtggggggggatttggaaggatgtggatattgcagatgctaacttaaggggggcgaatgtgaggctaatgagcaacacacttcaagtgaaggagttggaatccaagttctgaatgttttcactaacttcaactaacaaaaggaaaggagtggtcttcagatttcttgtttgtttctttgttgactaacccaagctcacagcatttcttcctaaatgaattgtatctgtaaatgagtttaagcgtgagcttgttctccagggcaatgctcttgtttggtactgttgttcatttatgtttatatctatgaagtgagaggaaacacacagtgttagatggcaaggtgtgctgttttcaactttccaaagaggaaatgagagcttcctattctaatctaaacactcttgggcagtaacagtatctgtgacatttttcttaacagaggaaaccctctccacttcccatcacaattattgggcaacaaaaatagcagacatacctaaggcattaaagtgtataaatcaggaagtaattttctgagcatcctgccacattttcaaacattgatttcagttctggttggtttaaaaatatgtaatttacatgtggaaatatttgctacacatatggcatatgtgacattatgttaatgtatcagatgattcctgttttttcttaagtgagcacatgtctaatgttctttcttgaaatgaatgacttcctgtctgacagtagtttgagtctggtgatgacccaagccttacctaccagctctattctcccatcttggggctttcctggctgatctctctgtcattcttctttggaaatgaatcctataagccagtttcctgtgagtgacgtcattcagatggcagcgggagagcacgtgtttgcaccgtggctggaactgcctgaggatgtcagactgaagtcaagacttagtctctttgattcatttccccaggagctgtattttcttttcttaaaaatagaaggcaaagggccagaaatgtagctgaaaggtggagatatttgggcttacacagagcaaagggagacagcaatcggatgtgtactgtctgtcttcctgttggctgtgctcccgaaaatctgacttctagtccccttaacacagaattatccccagtgagggagaagctgtgtgtggctttgcttttttatgtttatttatttgtttgtttgtttaaaatttatttatttaaaaatttaaaggcagagggtcttgctatgtaagctgactggcattgaactccctggccacttactttctttgacatcaggcctcagttgtgttgcctagggtgatctcaaactccagctctaaagcaatcctcctgtgtcagtttcctctgtatctgtgactagaggtacacacccagcttagtatgtttttaccttcttatggaacacagtggtattcttggctgggaatcaagtgacaggtcggaagtgaaggaaaggtcggcgtgcctgtctgttccttgcatgactgcccataaccatatgccatcattcacctgctcctcactacagtttctagacggctttctagctcacaacagaccagggagaagggcctgccttcctatcagtaatctgtacagggtggcatatctctacactgctgaagccacgctgacttaacatcatcagcctgagtctacaacttgcattagtggccactcaaggtgttgtgcattggtgaattttcacagatgactgtgccactatataccatgatggtgtcctatcaaaacctgttccagccgggcgtggtggcacatgcctttaatcccagcactcaggaggcagagacaggtgaatttctgagtttgaggccagcctggtctacagagtgagttccaggacagccagagctacacagagaaaccctgtctcgaaaatccaaatacaaaaacaaaacaaaataaaaaacctattcctccctctctcagccttgcaggcctcagtagatcctgacctcctatttgtcttataggcttgccttttttctagaatacacagctctatctatctactacatagtcatttcagactgacttttcctatagtaatctgattcaggttcccgtatcccttcttgcagcctacttactagattatttctatcttttatgtcaagactgactgtgtagatgtgcaacactttgttatacctgctgacaaattccttatttacccattgctgtgacaataggctagtcacattgtgtccatagtcagagagcagattggggtctgccctggtccttactatacccagggttacctgggatgtgaccaggatgcctaaaggactgagtttttcagttttgttccatcttaatttttctttaaatagccatatgtggctagcagtgacatgttggaatgttgcacggtgcatcttaaataccccagagtcagtcttagctgttaagtcatgtaacttagaccacttagcttcagtcttcataaatgacagctcaagtcagataaagtttttgtaaacctctcttaaagggtgctgtacattctgaaaggcccggatggacctgtgagagactgcttcagttccgtttcagaagtgggtttctcctcttacgttattggtatgcttccttccaccaggccactggtcctctttctttgctttggttgttaagcactgtggggctaaatctttgcttcacccagaacagctgcttcctaacagattgcatggttcttccctgcccaagagctctctccctctccgcttttcctcttccaccttcttctccaccttccttcccagcacccttctttctttttactctgagattatttatttatttttatgtaaagctttcttcacagccatgataatggttaggttttttgcatggtgcttggactctatcttgagacatcactaaaaaagattattaggacacacactcttcccttttcacagctttacacacacatttactatcttcagatccttgatatggtcagtgtgagagtctttgacctcagagagaaacgtgagcattgaagttggcattttatctgattgaatccagattggtggtttttgttttagtttggaggattttgtttgtttgttttccatttctcctttgactgcatttggggatgtaggaagtcttttgctgggtttgaaatgtctccttcaggatttcctagtccccatgcatgctcccctggaggtaacgaggcaagagagtttttgaccttcccaggatagcactgttaaaatgtacaactctgagaagatgtcgtaagccttcttactagtttcttctccctttgtttgtgtgctgtctccttccctgggtgttttgtttgtcacagcaccgttggctttgcttagacttgaggggtggttctgaaagcacagacagtgcgaagaagacttactagcacgccctttgccagcaggacgtcaggtagagcggaagcaactgctgtgctgacaaccaaggacagcagcctaagccatccgtgattcttggcagcctaaaacggcaaagcaagactcgcttccaggtgcttgatcaaagagagaactccattctccgctgtcgagtcggcctggtgcctctcatgtctgtggggcctgtgaggttgaatttagcacttaggaaggtataagaggaaaaggctttaagcataaaacatcactcagcatcttgttactgcagtctttgggcacaaaccctaggaaatactctggaattcaagtgcagtatgatagacatcaaattgtagtctgtagctgagatgcaaggccaggttccttgggaaagagtagatgggagaccttaaaaaaatgtgcttctcatttagccgacagaaaatgaaactgtggtaacattgctctacttgttttgttttgttttgtttcaatcaatgctgaaggaaaatgaaagctgaggagtttttaatgtcatttaatatgccatttgtggggctgcaggggtggcttggcaattaaaaaccacactgttcttccagagggcctgagtttgatttccagcacccatgcagcgcagtcatgaccacctgtaactcaacgctaggggctctgattctttcttcttgcctcgaaatgaatatgtcatctatatttttaaatgtaaaacaaacagatatgtttcatttttacttcatgagttgggtttaaactctctctcactcactctcgctctgtgtgtgtgtgtctgtctgtctgtctgtctgtctgtctgtctctgtctctctctctctctttctcttctcattttgttttttgagacaggggtctatttagtaggcagtcttctcaggtgtggggtgtggccttgacagtactcgggtctttctgacctctgtgactcagctttgcaggaatggcttcggcaagttggctcccagaaccaacttgttacctccaactcaatttaataccaaaatttggaaacaaatgaaaagatataaacattgataaaaatataagttccatgaagctgagcacctaatgcagaaattgtttccgtgataatcttggcacatgctccctaagactcctgccagaaatgttaactggatctcatgaagaactgtctgtatgatctcattatgaggagcatacttcaggacgggaacctggacaattcagctggccccagccccagagaatgtccccatctgaaagtcaggaatggtagagttgagtcttctagataagtgcatcatgtgatccttaattcaatgtttaaaaaacaactttgtcagaaactctgtcctttaaaggatataatctagtggcttctcatgtacccagaatcatgttgtcaccaccgtctcactctcaggtccttcacaccaaaaggaagctccctgcctgccgcctctctcctcatcccaccagccactgtagcgcttggggctgcttctgagcattgcatgtaagtggaatgctctgatagctgcttcggggtttccctgtgctcagggtccggctctgctccctttccctttgtacggagtggtaggtttagttcactctgtgtgtacagcacccctcccccattgtcagctgctgagcatctttatgactgcatgcaggtagctgtgcctaaggcaggttctgtccatccccagcacatacaaggtatttcttaccccgtgtgcccctctccccatgtgcccctcacctccatttttgttgttgaaagctagaaactttaaagataatgtggaaattatcgaactccgctccccacatgcagagtttgttgtttatgtagtaagacttctggactaactataaagtctgatttctttgttaaagagagccacagaaatctcggtttgccttgcttagtcgtcagttaatgactgaacagagtttctttaaatccctggaatcagcaagtctctcagcctgtatcagagtgatcttgtaaatgcaagtcagatcgtgtcaaccctgtgcctcggccctctgatggatggcctctgtttcactcagtacaagagatctgagcagcctgtaagatggccccttttgcctgtgctgggcaggtctttttgccgaccttacagttctgagtacgctgcctttgcagttggcagatgtgctccgcagtctctccctgttgggcctctgtccagtcacatttctcctcctgccttgcccacaatgcctgttcacagtagaatctgttcctcatggttcctggagggcttagctttactcactttctctacagtggaaggtgtctttgaatgatggtcttggttggataagggcatctttggcagtccattcttgcttagaaatgaggcagtggaggctgcctatagatcctctgtaagagtggagcaatgtgttcctgaggactctgtgtgaccatgaacaggggctgttcctgggttccctgtgtgagagtgagtgctgcctgggaatccctttgcaccttgtcttgtcccctggatgttttccttttgatcctttgagccactgtttccagacaccagtgcctcaggacctttggttttcttcagagactacttcctgggttcttcctgaggtgcaagcacagcagtgcccacttggcctctggtatttaagggaccgggacaaaggatctcaggacctgacatttggacagttgtcattttagccccacagcttgagtcatttccacctttgtcctttcagccccaaagccatgcagtgcagcttgggtttaccagagatctgtgtattctgtctccctagagatggtgggaattaggtgtccccagccctgtcacccccttcctcgtgccatgcctcctcctgtctgcccaggcgcaccgtgagggacggtctcagtcttcccgctcttgccgctggccttctgtctgtgcgcttgctgacgaggtgtgctccctgcgccactgtgcctcctctgtcctaaagtccttttcatacgtgtttactgtcattttaacaaggcttgggggtaggagctgctgttagtaactgacagctccttgtaattcttaatattggctttacttttgtatttaactgtttgcttgggatgtccagtcttccttggctcttaaatgtagacatgctgtctgctcatttgtactgtcagagccttgcgtagaccagctgacagggagagagcaccataaacagggtctgtcttatttagccttgtttttcctatttttagtatataaactatgtttctaaagatttatttatttaattaatctatatgtgtacactgtagctgtacatctggttgtgagccttcatctggttgttgagaattgaaatttttttttaggacctctgtttgctccagtcagcccactcgcttcagtcaacccctatcgctcagtccctgcttgctctgtcccaaagacttatttattattatacataagtacactgtggtccctgcttgctctgtcccaaagatgtatttattattatacataagtacactgtggctgtctttggacgtaccagaagagggtgtcaggtctcattatgggtggttgtgaaccaccatgtggttgctgggatttgaactcagaaccttcggaagagcagtcagtgctcttacttgctgagccatctctccatcccccaaaatatgtttctaaactaaatcaaaagtaaatcatggcagataatttttctccttttcaaaagtaaacactgctgaattatagctcatgcctatggtcccagcacttgaaagacagaggtagaaagatgagcagttcaaggccattctgaactcagtgagtcgagaccagcctgggctcagattgttccccaaaataaaataaagcataagcactgagattaaattgtagtaatgctaatctgagttttgggatcagaggacaaaaggctactgcagagcagtgcacctttggatgactcatagtactcaggctaatgcctgtaaacttggatgtgcaattaggcagctcattatgctgcaaatgcaattacatgctcaaagacagctcctccctttggctcacccagtctgtgatcgctcattataaagcctcagctgtcaaaattgggaaacacaagtggtgctggtgggtcttatagccaacatggaataagctatagaaggaaatctttatattataacttagctaagtttgatatttatttgctacaggaagcaatagtgtgtgtgtgtgtgtgtattctagtacagtaccatcatctctttcttacctgtaatttttatttttaaaaaactattgttttcttttttataactgacctgattccttaggactcaagttttacctggattgacattaatgaggctttcttatcttcattttgtcttgtcttaacgcagtgatatgaatatacgtgattctgttatagacattcttaatgtgtttaacaatgggacactaacccagatagcacctgacatttcatataacctacgttatatttactctattactattttttaagatgccaaatgttctgtgctgtaaagcctgggcccagttatttctgatgaaggtgatagcttcatggggagaatggcagtttactgtttggacctaggtttaagccccaggtgtctgactttatcccttcgagtggtcactgaggtcacaacagtgtgcacttggcctctggcattcaannnnnnnnnnnnnnnnnnnntggtggtgttttattgcttgaatcccaggaatttctgtctgtttttttttgtttttttttttttaatttctgtctgtttttaaaatgccctgaaaataattaaaataacttaatagttaacttgagtggctgccaagtgataggattattctatagtgacctcagtgaccacttgaagggataaagtcagactcctggggcttaaacctaggtccaaacagtaaactgcatcagcattgctgatagtcagcaactatagttctgttttttttttttttttttttttttttattggacttgcttacttatttgtgtattgtatatgtatgtggccacacacgtgttgtggtcagagaacaactttttacaccatgtgggtcccagggatagaacttaggctgccaggcttaggcagtgggcaccagactagacagtgggcgcctttaccacggccaattgagccatctcatcctctcaggacctggaatgtgttaagtgagttctctgagctacagctcctagctcagaaagcatggcatggctgatggaaagttaacaggtcatcagatgttaaaaaaaaaagtttttctcaagttataaaagcaaaacttagtaattagtgtgtctaaggaggattatctgacatgtaacattatgccttggaagacagcaagggactttgatacgttaatatgcagtcattgtaaatataacaaatcatgaccatggttttttcaacttactcattcgtaggtctgtgaggaaagccctagtgtggaggagtgcagagttaacacctttagtaagctccacttcctcacggtggctgtgaggtctgtctggaaaggaagtgggaaatgtgctcaataaagtcacaaataggtttaatcctggacttggtggaaaatttaatggccacaaatctgtttgtagagattatttatcataagtaggcctgtctcccgagaaacaaattaaaataattccatgaaaatccaggtaagtaatcaaaaggaaagtcacaagacattataaaagaagcctggggccctgtgaggtggctcagcaggtaaacgtgcctcccactaaacctcataacctgagtccctgtaacacacattgtgaggaagagggccattccctgacagttgtcctctgacctctgtaggacacccccccacatactaataaataaatgtaatagtaattttttttaaggaggctatggaaaactagatttgtatctggtctgacattgttattcctatcaccatccctaagagaaatcagagcatgaaatccacaaatccattcttggtccttcaagttcatgcctatagctgccttgatgctaagattccacctggcctcatctgtgtttccctcacctgcagccagtgggctacagattgaaaatacttgcaaaatatgatctacatactgagtatatacagacttagtgtcgtgtggcaaaactttctgggaagatacaacacacatctactcacccaagtgggtatcctataacaaactgaggtacgaataccaccaaagtccaacttggtgagccacgagttttattgggattacttacaggaaaagaaatgactcaaaagacggctgcatcaccaaagcccaccccagaaactcacaaaaactgggaacctagagcacagtacacagctggaggcagctcaacaggttgaagaatgtcttcctaggtgtctcagctcaagtggtctaaaccgcttctgggcagctggtctggtctcagtcttctttgcagcttgtctgagagtcttctttgtagctcattgtttaagagggactctcagcttctattgcttattctggtagggaaggcctagtgaatctggtcagtttcagggacttcctgaagctattttgagttgtagagcttctctgcagggtgaaatgtttcaatcctggagggaactgttatacaacacttgggatttgggcttttagattccagggctttgaaggtcactttgccctaagcaatatagtgtactagttctttacaaagcactagcttttaaaaaaacttgttttcgctcgcgcacgcacaagtgtgcgcacctctgcatgagttttaagtataccatgttcatgcaggagcagaagactggaagaaagttgggttccctagaactggaattacaggcaattgagagccatctgatgttaactgaatccaaatcctctgcaggagcctcaccccaacccccaaaatttaaaaaaaagaaaaaaaaagttacgtactttgtaaataatcaagagatggtgtttttcagtgatggggattaaacctaggcccacacatctgctcagccagtcttgcactgtgatttaaactacataggagaacttgtctcgtttacaaacagaagctgtgctgtttcatcagcacctgcacattttggtgtaggcatgagtctcagggattggtggtctcctggtgatacccagggcacagctctgtgttgttttgctgtcctatacatgacagtcccttgcattggagtcaaactacatctgatgttcacccaaaagtgatcttatagctgatagttttataagctacatagacatttttttatctgaataaggaaaagagaccatttggaaatagttttgccagagacactttaaactgtaatgtccatgtatgtaaagcctgtacatgcttcttaaaatttggaagactgtcctaggtgccatgatttcagcattagcaaaactgatgaaggtctcgagtcttgatatctgaggcctcgtgttgtagaaaagtagcagtgaagatggccttgctgggaaagcttttctccttcaggtttccaagggacctcgagctttctgacttgtcgctgtgtttatttcagctgaagtcactttggatttggttcattgcttttgtttcatgtgacgtgtgtgtgtacacttacatgcacacaccatccatgccttttctctaggtgtagtttcaactttaaagggatcatggccaagaagtactttatgtattgtaatgttgagtataggtgcctgttgattttaagctgctaccccacaattacctaaaaccacagcagttcctttaagagggtccttcatgaattttttttttaggtgccttacattttttttgaaagctaatctgtgtttgaaatcaaaccatttcacttatcatttaacatagcataaatagtagtactgggaaactgatctgtaaggctcctctatgacttgttttcatgtagcctcttgagtagtacattggctgcccctgcccccatcttccccctttgattgaagaggtgttaacacaggctattttcctttgctatgcctcttcctactatcttctcaaaaaaggttaaacttaatttcataactttcactatgatttggttgccctccaccccccataattactgctgaagtaaacaagtaggttatctttggaagttctgttgtgctgaccttgggttctcttgtctgtagtatcctctaggaatgagcaaatttcctttgaataagcactgacttcaatgggtgtggcacagtgcagagaaagatactgttaacaataaaaagctatccagaaatcgcaagctaaatgtatgttagagcatacttatgatactaaatatgtgttatagaattctagtactgttttgagtgagggacatgataaataaatggatagaagttactataagtatctgaattccttgtctctattttgatagttgtgatgtaacagcttagtacctttgtatctttcccctttccagcctaaattcttttactttgtttattccctttccattgtattctctgtcatgtttacacatattgtagctctttcctctggttgaatggaatacttgcaaccattgttaaagaattttggctgcaaagtgagtggtgtttgaccttttaatgtctcctcccaggttttgggtcctgctcccaggtggtgttccttcctggacaacttgacagaagagttagaagagaatccagagagcacagtgtatgatgattacaaatttgtcaccaagaaagaccttgaaaatttaggtaaaatgtgataaaatgtttatgaaattgtcttatttttacatttgtgggttttgaacattagaatcaactgagccatttttatctgatctttccaaatgtcccgtttctgccaaatcagatatcagagagttctaaccttataacctctgctcagaaaagctttggtaaaatcaattggctgaagcctttcatgctttaactgggagagactccttttcagcaaccgacatcctgtcctgagagtggtgtctctcggagtgatgggagtcaaatgtggctttgagagtgtgataaatgtaaataaatatgacaccttgaaactctctcagactgtaagcatatggttcttagatttattcataaaagacctaatccaaaatttgggattcaaaccttgaaatagaaaagactcttaatgcaggctggatattccagcctgaagtctgaagtgctccaaagttcagaactttttgaatcctgagttgccactcaaaagtttcagggttttgagtctggattttaaaattagggatatgcagctttccatcactgtagcaaatacctgacttagttttccaagagattttagatcaaggtgtgtagagtttgcagtctgtgactgagcgcacgcatggttttagacctgcagtggggcccagcactaacgagcaagaccctcagttccctaaagaccttcagatgacgtcattaacagatagtttatgttggctagttaatcagaccacatactctgaggaaatgttgggtactaagtccatgcagacacatgaatacattgtgcgttaactcctattgtaactaattgaagaacatcctaagattaatttttcccttctgttgttgtatgcatactactttaaactatgtgatctattttcagtataattttcaggtctaaatatggaagtcaatattgaacaatagcgaaatagcctgtggcctattgtctcattcacccaaaaaactgaggtagttcaaagcttgtctgggatgcttagtgagaccatatctcagaataagaagtaaaaggctggcaagaggtgtgtgtgtctcatggctagaaagcttacctaccaagcacaagactcttcttagttcaggtaccaccaaggaaggaaatgacttggtactataccaaagctgtaattcacacatggttcctttgaggataaattgtctcgtgacagccatggtgtgttttctctctctctccctctccctccttcctcttccctcaatatttgcacctaaataatttctagggaatggagagatggctcagcagttaagagcaccgactactcttacagagaacctgagctgggtttggagcacccacatcaggcagctcacagacacctattactcaagctacaggggatccaacaacttcttctggacaacataggcacctacactcacacatgtataaacacatacatgcataaaaacatgttttttaaaaagcaactttctgtgacatagcagagagttcatatgtgttccctaaatgtgtctacacttaatgtgttcctagtctaaattttttgatttattactacacgtgtgtgtgtgtgtgtgtgtgtgtgtgtgtgtgtgtgtgtgtgatgtgcttgtgtggcatgcatgtggacgacacactgacagctttatagagtcggttctgtccttctgcctttatgtgggttccagggatggaactcgggtcatcaggcttgcatggccaatgctttacctgttgatcctcttcctagctagcccttgtattcctactctaaatgtaatcattaggaaaagctacggaagagaagattcccgaacataaactgataatgacctccagttgtgtactggcagcaatgtagatgtttgtgatgctgaaactgtgagtgctatacaagtattccagctgacctgtacccccagccaggaatggtcctaatatgcatgagcatgtgtgtatgtgagttaagtttgtcagctgtttgtgcttggaggaccatgctatcacattgtcccttgtttctggaaatgttgacaacgctgccccagtttttgctttcaccattcctacctaacagtatatacctgggaaccaccttgggggtggcgacagggggagtggatctctatgagttggagtccacatagagagtcccaggacagccagggctacatacagagaccctgtctcaatgaacaaatgaacggtctgtttcaaaatctaagaccactactttaaggaaccctctttaccacagtcatagtaaaaaaaaaaaaaagacttttccgtcttttatacttaatatgacaaggggaatggtattaatggaattacttataaattcccatgaatattcaagattaacagtccttaattatgttactttaaagggaaaccgtatcataattaaaatgttgtttaagaaaagcttaaattgtaaagactggagagagctccatgattaaaagccctgtctgctcttctaggttcaattcccagcacccatgtggctgctcacaacttcctgtaactccagttgcaggggtccaccaccctcttcctgactccacaggcacggcctacatgtggtgcacagacagacatacagacaaaacacccatacacataaaataaccattaataaagaaggaaagaaaaacttttaatgtcttttaataaagacatcatagagatttatcctcttctgcttaactttggcagggctcacacatctcattggatcacctttcctccgagcatatatgcatgggtttttcatggatatcagactctaccacaaggtaagtactgctatggatatttcaggtgatagtaagccatccacagctgcttctacctacttttgccttcacaaagcatatgtctgcattgtgagggatctactttctttggtacaatagtcatggtatgtatatgctactaaatactgattctgattaatttcattttttgttttgaaaaggtgaaattgatggtcaatccatttgcttatgaagaatataggaaagataaaattcgacagaagatagaagaaacacgtgcacagagagtccaattaaaggtaaagatctactcagcattccgattaccgggggaaaatagttaatcttcattctgtgtgttactctgaagaagtctgctatcatatccatgaatttccatcttctagctcacatcttttgctttcttggtgtactttgtcatgagggtggttggttaggtgtttgggtaataatatgtacttgataacaaccaaaaggccaagacacactaggctatagtgttttgatctacagagctgctgtggaccacactgaaacacctgataacagttcccgctgctttcagtgtgacagatgttagcaatctgcttgtctccacctcctgcaagtgagcttggttttcaggctctctgcatcccaggatgcagagatgtagacagagttgggaaacagccagcaccagttgtattgatggagagaattagtgtctggaaggcatttgagctcccaaaagacagaaacactgaggtaggagaaaaggaatagtaacttagatccaggcggcaagaaaggtatgggcgcaggaggacccagactcctaagggactggcaggctggtggtcttggcatttgagggtgatcctaggtgtgttgagaactgcagacgggtgaataccactgctgccagaaccacctgctagccccctggtaaagaactgctgttggttatttcagccagaccatgagcagacagggtggagcttcctgtctgaatgttcctgccttcctggctctctggcgtcccatccattaagtcaaatcactgagtgataaaatctttataactgaacattggtttaaaatatggatgtaatttacacactctcacctacaaaaagactagtgactgagatgacctcagtgctcgttccattttccacagttattcagtttataacagcagtgattgtgagtatgcatgagttttagcagaagggggttgtgtgcctgccagagctacattttacttagtacagtaggtgagcatgatgtgagagaaggcagtaggtagcccaccacttatctgagagtccttacgctcccacctagactctaggaattcaccttttacagagcaggaagcatttcagaggttcccacaactgcagcagagagcagggcaggtggctgcaattgcaagggtcctaggccctctgtggccagctttctagggatctgggaaggcagtatgctcccattacaggccatgcttaccattctgtgccatttggcccacctgctgctcttccttgggtaattcttttcctaccatgggtggtcaactaagaagtatgggggacttttggtatagcattggaaatgtaaatgagctaaatacctaataaaaaatggaaaaaaaaaaaaaagaagtaggagtgagctgccctttgtgaacttacactactcacagacctgctgacctttaatgttacgtgtatttatctcagtgtctcttatttccatctctttaccagaaactgccaaaagttaacaaagaactggcacttaaattaattgaagaggaagaggagaaacaaaagtctacgctgaaaaagaaagttaaggtaagatgtcctaaggcacataaagtatcagtaagttgatttgcagtccatgggtagttatgtatacctttttattattggggtttccccaccctccatacttgctcagtatgagaagtttgaaaaattgaaaaaagttaaaagccaccgccacctcccacacctatagaagaaaagcattagtattgggccgattcctccgcatcagtcctcttaaaggtatacactgtattagcagtttcacatgttgctagattctctgtattttaagtggctatatattctgtgttaaaatttacttaatcctttgctgctaaattgctgttgattttttttctgtactgactaggtttattggctcataatttacttttatttgcatttattttatgctgaacttatttctgtgctcaggaacagtttacttcttttggtcaggatcatgtgcatatggccgggaaagctggcattagagttgacccactgtgagctttggatgttcggtggccatcggttagctcacagtgtggacagtgactagataatcattactctctgaacccagcactgtttgtatccccgacctgtgtccagccccactgtggcctgggcgcgcctcattctgcaccattatgtcgtggatcagtacacattgcttccttaaagtgatacctttcagacacatggtggcttttcagatacttacacccttaatggcctgggcagttttacggattttctgaaaatgaacatgaaaatttgagcttcttgattttcatgattttaaaggtcaagagtttttttaactgtagaagtaactgctttttgtttttgacatggcattatgggagggtatgtgcttccatgtagctgctacctgcctgccttttctgaggtaacagtagacagggagcagccataaaatactaaacgttagcacagtattagtattgtcccgagttgggaagatgtacctagtttttccacatttatgaagagtcaggagtcctcccctgtcctgtcccgtcatctgctgagagcagtgtagtatccactgcccccaaacccttgcccaccagaagagcatgcgggacctggagtcagggcctaaccttgtggccttgggccctgcaggctccttgtctggtagcttattctttgctctccaaccaggtatgtgaatgtaagctatagttgcatgagccctactgtgctctttggttcctctgccttcctcagaagccaggctcttatttggttcctcagctacactttcacctgtaacccagaaggacaggtaggggtcatcttactgctgtcacttctgtggtgttccgaccagaagctttactctgctgccttctctctcttctcttcggtagcctctcccaatagccttttatcctggtctactacattctttaagtaaattatttaaatctttggaagcccctttaaagtaaaatacatggatggttttatgtttccctgtcctctgcatgaataataaaccaatactgagcaagcttactcatttaaattcacatttttgtgctgtagctatgtacgccagtgtgtgactaagtgtgtataccctgagtgtgtgtgcctacagggtggaaatagtggcttcctgctttgctggcgtcctccccagagcattcacattggtcttgttagctgagtctgaggatgattagcctgtgactgttttagctttataatgtccttttacaagccgtgtggaagtgatcattgtatcatcttcctgaagctcctagaaaaagagagtggcgcagatttagactatagatgtgtgcatttcaggtaggccttgtgctcagagtccttgacacaaccatgctatagggtacttggactaaactcagtttcgctgttttgagcagcatggtgtatggcagagccttcttataggttgtgtgatgaagatgcagaagttggtgcattccctttgggagaccctgtgtgttggggaaagagtcttggtgtgtgttcgtgcactgaatggtcctgcagtcctcaggtgctgctacactggttttggagactctccctggtgcctgggattaggctcggctagatggccagtgagtcctgggttctgattttctctccctcctcagtgctgagattatagggacacactcccatacccagattttcaggttggttctggggacatatttaactaactgagccacccctttcagcccttcctctgggaggcttttgttgaggttggatggaggcggggtagtatggaatggtagaaatgacctggaaagctggaagcacacagcggtgttcattttagtgaagaattacattgctcctcccctgacggttttcccagaactttaggaactctctcctggtctagggaaatgaaaataggcaactgaagccttttaaatacactgttaattaaaacagtagaaaatatcctagtatttcactttttaacttattttgtaaaaactgtcaagaatattttgaacaatgcttgctattttctcttcccacactttcaatgtggacccagtgttttcctttgccctaataaattgttgcttttcaaagtttcatccaaggccctctttatatcattaactccaagagcacgttcatttctgcagtgctgggattaacccagggtcccatgtgtgccagaaaagctctttgccactcagccccattctagctgttctgagagttcctttaatatgacgggctttgctggtgtcattgcaagtgacatgtttaccttctgttactactgctttctaatttattttgagacatttgcttcacactgtttctcaaattgtatctattaagtcctaaccagtggcaatgtcccatttcccactcccagcttcttcctctgtacctcctttcctccctcctccccttcctccctctgctacattttcatctttttcttctttaattaccaactttgtgaagagcctttaacatgggatgcaaggtccagcaatgctgtgctcctgtgctgtgtaaactgctggccataggggcgcatcgctcactgagagcattgaaagacacgccatggtggctgctgctcgtgagcctgcctcctgttcacatcagagtgctgggagtttacacttcatgctgataccacagttgagtaacttcagaagtctgaaaattgaatcgtggtgttaaggacatgctggtgtttaacttaatctgtgggctctgactctctggatggtacttcaggcaagcatttactcttgcttccacctgttgtgtacttcataaccaagacagcatgcattcccttcagcatctatcttagggggatagttattgggttggtactgtttgctagattcagagaggacaaagcctatattcctctgtcaactgctgtgtcttcctggctctttataaccagttgtgtctttatagccacatcacctgatcaccagattcttctaggaagctttgttaataaaatggaccctgacttgctttttattgacttaatctaaatcaggtcctattattagagttccatcttactcctgaaatacagatatagtgtatggtcttttaaaaatctgttcttggagttgtataattcatcatctaatacttttatcttcaaaccaaattgtttgttcataaattaaagaaagctccccttatcaggaaggaagatttgaaagagttgcaaactacagcaggccatcagtttctcccatgagcaggacacgtcagatcctccgagtgtcactgctgcctcctgaccctaaggaagctctgccttgactgatcccagttactgttcccagttactgttcccactgataacgtcatggagtctaataagctgcatactctacacttgatgttgagtctacaacaggaagtgacctaccatgtagactaccatgcagacagaccatcagtgagcgctgtctggctgctgaaggaacttagaacttggtggtgttaattagattacctttcaacaaatgcaagttgagcttcccatatgctcaagcatctttgagatgtataggcgcctgtatcccatttggcttttaagagtccatccaagtgggtgggaccatttcccccacagcacgtgttctacatgccagccctttttactcagtttctctctgttgctgtggtctgtgttgagtgcgttgttcctgggttctgtgtgagagaggctgtctgtggactgggactagaaagccacagaagcagtgtcttcgtctcaggaatcagtaaatgacattaacactttatagtaaagtaataattcatcgctttggggaacaaatgtgattatgtgcaaacatactgagttagatcagatagttttaacattagaattttgtcatttaaagtttttttttttaattgcaaattacaattacagtgatatgaacactcaaaactcggtgttttcacaggggctcctgggatggttagatatcacacctctattcccttatcttccctccctgccttgcttgtgcttctgttgggacccactctcccctctttagctgcttattttggtataaaactctttcctgctgttgcctgtgatgctgcgtcttgacttttccttcctgctggagctagatagtaattttggtgaagtcaatattgggctttacaatgctgtaactatgtaaatgctctttgtagtcaagtcacctcacatgactttgatttcccctggagtaagtttctgtgtcgttatcaccaatcagccccttgttctatatcataagtctggaccttgtggcaagaatctgtgtaactcagatgaagaactcatttctaagtctttgtggattgagcaccttcaaatcctggggtctccctgaactgtttcatgtaatgttctctacgttggacaaagaattgaaagaactctgggtctttgaaggaatgcagtttctacccagatactttgcattcaccagatgagtgcccagtgagggctcatgggggtaaatacaagacacaagttctcacagcagcgtcacactgcaccctccagacagtgctgagagggcttactcctgaaataggagaggcactatcctggcaaagctctcgtgaccaccgtaccgtgctaggtgccttccaggctgtactctggcccagatggatcgctggctgcttgctgaaccactcagcctagaaacctaggtctttagtgtagagggaattctcttggaagaaaaaattattatttcctgccatgatcttgataatttgttcatagtgggggtggggacctagagagctgcatgaaaatacagaggaggggacaggctgagatatttgggggagtacccaccgtcagccctctgaggtttgtcacttgcaggctgggagagcacccgctgtgtgccagccaaccttcatttcctcctgttacttctcacttccctctcacaacccgcccagccccgctagacctcctcctctccctccttccttaggctagaggtgggactagagaatcagggttttaagtagcaggtagtctctgtatgtttctatattgggacaagataataataagtgtctgctcggagctacagaagtgattctttgaggtagtgctgaaggtggtattcacatgttttccaaacaccaaagcaagtgttgagcatgtgtatgtgtgtgtatttataagacagatcactagccagacacttgtaaactacttcaagaacatcactatcttattcttttttcttttaagacagctgtgaaaataagcaattagacaagcagaagtccttaggggaaatacctttacagctgggtcaaaggagtttttattttataatcgttcatctaacgcatacttgtctttaagcaggatagtttgtttgttgtaaactaacggggagaaaaatctttaaaataccaacaacatactctatttaacagtctctgttattttaaatataataattttggcaaatacatcaagatgttaattttttccttctttgttttttaacctaataggcacatggcttttgatgtgaaatattggttgattaccaatatcagctttctcacatttataagtgactccaaaatttacctggcagccccctcctctctcctgagtccttgttgtatgaattactgctcccaagacacctattggtgtcagtcagactgtggatgatgtctgtgacacacttagtcttaaatgaacatcatctcccgcccttcgctctagcctacactttttaccctgatgctctaatggtggctccaagctcatcattccagcgtctgcccacacagaccaagcagctaagagctgtttccaaccccatgcttcatctttagctctctcctctcatccagctgctgctgctctagttccatagaagtgtgtttcacagggattgctccctggctagagtcagtcccaccctttgatttccatcaccttagtgcaggccctgcctcttcatcacttcctaggatgcctctgaaccttataatggttctagtctctttcttagccctgtgccatgcaccatgcagctgccacctcttaaagcagtttgtcaccgtgtcctcctctctcctgactctttctctgaataatggctccccccaagtcttcgaagaacagtcagagtaattaaagtgtttatagtctgccttggttgtttttaatttttgtcttttaggatgtcttttccaaattgccagtctgctcttgccagataattcactactccttagtcagttgatatgctgtctttgtatttctttctttctttttttttttttttaattttatgtatgtgaacacgttgtagctgtatagatggttgtgagccttcatgtggttgttgggaatttaattctagtacctctgttccctcctgtcagccctgcttgctccaatcggctccattcgctcagtctctgctcgctctggcccaaagatttatttattactttatatataagtacactgtagctgtcttcagacgcaccagaagagggcgtcagatctcattacgggcagttgtaagccaccatgtggttgctgggtttgaactcaggacctttggaaaaacagtcagtgctcttagccactgagccatattgccagccccgtaccatatttctttttctttttttaattaaaaaaaaaattatactgtgtgtatatgagtgtaggcttgagtatgtgtgtacatgcacgcactcacacgcgcgcactcacacactatatatatatatatatatatatatatatatatatatatatatatacatacacacacacacacacacacacacgcatacaagtacccatagaagttggaagatgtggatcctctggaactggagttacagatggttagttgtgagctgcctagtgtaggaggtactgggaacagaacctagatctctgctagagtagtaagttcccttaactgctgatcatccagcccttcttttccaatttctacttgttgaaacctattcggttttaggtctcctcaatgccatgtccccaggatactctcttggctatatttctattaaattactttttttcctctgagaaccttcatacacctgaacatccttcatacattctgaatgccctttatactttctgaacatttttttcatacagaactttgtagcaaacactttgcggtttttttcttccctctgaaattggagtcagacactaggtcttttctttccttggtctattttagaaatgatatttactcaagggtgacttttgaacttgtatctcttggagttttagttaaggggttatagtttatagtttcatacaagtaataagggggccatacttggccgttgatttgctgtgtttttctgtagctctgctacacagatgcggcattcaggactgagttcagaagtggagcatcagccagttggtgaagcgagagccgtcacagtaggctggcgcttccagctcggttctaggctggcgctctgatttataatcattcctgggtgactggtttccactggcttccaggccctgagtgtgaaatgaccatcatctgagtcagtgagcaaatgtgtttgttatacacgtatcttagtcagggcttctattcctgcactaacaacatgaccaagaagcaagttggggaggaaagggtttattcagcttactctcccacactgctgttcatcaccaaaggaagtcaggactggaactcaagcaggtcagggagcaggagctgatgcagaggccatggagggatgttctttgctggcttacctcacctggcttgctcagcctgctctcttatagaaccaagactaccagcccagagatggcaccacccacaaggggcctttcctaataatccatggtccaaggaagaacaccaatggagttatccttataatgcatggaagtgttccagcttcatagttgggaatttcatagttcctgtgttggagacagtaaagtactactgccagctacaccaccacactgactgacagcttaaactccttccattgtggactgtgacattggaaagctttcatattttactttactatgatagctatactttagaagccatatcctatcctggtagtggtggcacacacctttagtcctcatacttgggaggcagaggctggaagatctcagtgagctagaggccagcctggtctacagagagttccaggaaagccagagctgcgacacagagaagccctgactcaaacaaacaaagccgtatcttaaaatttgaagaaaattctttcctatatagtaagcataatattaacgtaaaggttcatttttagatcattatgtataacagccaagaattatcaatcagctgttaaatttaccagtagaatttgttttgttgttggaaagtaaaacctagaatcaatcagaaagttctagaaattgtttctaaagaaattttgaacattttatgtcaatagtctataccttatggactaagtgttataaaaccattttctggtggtttgttttgtttttttaaattcagacactgactggtccctgtctctcttgcagagcctccctaatatcctcacggatgatcgatttaaagttatgtttgagaatccggacttccaggtggacgaggagagtgaagagttcaggcttctcaaccccctcgtctcgaggatcagtgagaagaggaagaagcagctgaggctcttggagcagcaggagctcaaggatgtaaggcttagctgtgctcagtcagctgctggtggctgctgctgcttgcttgtttgcctgctttaaagaccttttgttctgcggtatacatggccctgtgttgcataaggacactttgacacagtctactgtgtccccctcacccttctcctcctgttagtccttgttccaccgaacggtcgaacttcttctctcatgtcatacgtgcacacgattctgtgtgtgcacatgtgtattctatataaaatctaagagcctcaagtgaaggaaatcatgacatttcataaagacagatactgtgtgtttacagcttcttaacatacagtctctgattatacatgagaggtaattagttgtatactaattgcttgacattcagcctggaatgtatcttattaattaaaggcatttcttctgatgctccatggagcagctgtcatgtaatctgatgggctgatgtctctaatggtccatgtttggccaggggaagagctcttcctgctatttttgatttcaggaagaggaggaagaaccggaaggaaaacccagtgatgcagaaagttcagagagctcagatgatgagaaaggttgggttgaagaagtcaggaagcagcgcagactcctgcagcaggaagaaagagtgaagcggcaggagcaactgaaggaggaccagcagacagtcctgaagccccagttctacgagatcaaagctggcgaagagttcagaagcttcaaagagtctgccaccaagcagagactgatgaagtgagtagcctgtggagtccagccatgctccttcctctcaccttcctgtcctctcacacctgttctctctgggtggtgggtaccagaggagaggatgggggtgctccccaccccgcaacccagcaggaaagtcaccagtagaaagaaccactgggccctccctgccctttcaagtcttcatatattaacatatgttagaacacttaatctctgaaagcctcactcttgtcccgtgttttccattgggttgcccaagcctttaggtacttgctgtgtccacatcctgcgggtcagacagcatagcaaaggcctcttaacaaaagtgatgtttaattaatttgttggttttgagaaagttttgttaggaagcccaggatgcttcaagctccttctccttccttgcatcacgtttgaggcttacagagcctctggttaacacccagatcaagggctgggggattcaattttggtaaagtgtttgctgttccagtgtgagggcctgaatttgattcccagcacccatgcaaaagaactagatgcagttgttcatgcctggaacagactgatcctggaacttggccagtcagtctagccaaatctgcaaaaaccaagatcagtaggaaatcatgtctcaagaaaaaagaagaagctgggtgtagtggcatacacctttaatcccagcattcaggcagcaaaggcaggagaattacaagttcaaggccaacctagactcctaggaaatcccagggctgtacagaaagaccctgtctcaaaagtaatttattaattaattaatttttaaaaatggagagtaattgaaaaaggtactcaattttggccaccagcctctgcgtacatgtgcgcacacacacacacagacaaacatagcaaaccctacctagctcagttacctgattattggaaatttactcagaattttgcttgaaatattaagtcctttacaactgaatggagagatagaagatgagtagagtagtcaaatacagggagataggaaaagtggtggctgccagggccttagagacaggagagaggagcaccttttagtgggtgccgagcttcggtgggacgccaagcatgccctggagatgctgtgcagcatgtaatatgcgtgctgctcccaggctgtccacctcacatggtgtatatggctctgttctaaatgttcaccagcctgaaagagcatcagccctcagaaaagtggtactgttttgaactattttcagttgtcaagtatcaaagtgcatcttccctttgagactctgtaagcagagcattgagataacactggacactctgagtgatcttggagagaagagttgggatgcccttgggagcagctggttgggccagagacattcagcagagccaatactactgtgcctcttgagctttcttctccagcactcagttttccattcaggaacaggggtttttacaaagtccaggggaagaaaggtggggtggggaaggcatcagtgttgctgctggagttcaaacatgtcacacttctgtcgcttatctagcacagcgatggtgagctgctccttccccttagaaccaaggagcacatgtgttccagttaacaaaaggtgtgctataaagaagctagtggcagccgggcatggtggcgcatgcctttaatcccagcacttgggaggcagaggcaggcagatttctgagttcgaggccagtctggtctacaaagtgagttccaggacagccagggctacacagagaaaccctgtctcgaaaaaccaaaaaaaaaaaaaaaaaaagaagctagtgggagagggagagagagagagagagagagagagagagtgagtgtgtgtgtgtgtgtgtgtgtgtgtgtgtgatgagtagagttttttctgaggcagccatttggttagttttggttttttagagacaagagtcactctacagagagcccaagctggcttaaccatagctcaggctggaatgtgtttttacctacgtgagtggaattgcagtcatgttgccgctctgtccttagcctttagagaaactgctaaaatagctttgcagggtgggcacaccatagctgtgcaacttgctttgtccaggattactctcagaccactgctgcagactgcttttattgtttattttctgttgcatttgtcttgcttcgtgcgctcccagctagtgcttggaatggaatagacactggaaggacagcctgacagctgccccttcaggtcttctcaagaaaacctcatgtcctggtaaacgctggtaggaagcggcagtgattgcgttcagtgtagccataggagttaggccactttggggggtggaggatggctgagcttgagaacagtcttcctgtgggctggagctggatagtcacgtgacaaacaagcaggagaaaagtttgtagttaggggctaaagagatagctcagaagttaagagcatctgttggctttttggttttttgttgctttcaacaaagagggttcagttcccagcaccaacatggtggttcacaaacatctgaaacgccaattccaggggatctgatgccctcttctgacctccacagaaccaggcccgcacatgatacatatatatgaagatgaaacactcatatacataaaacacagttttaaaatacttttagggtttttaaaaattcttatttagtagagcagaagaaatggctccatggaagagagtgcttgctgttctttcaaaagagcctgagtttacttccagcactgacatcagaaggctcacagccatgtgtaagtccagctcccagagaacctgcctccctcttccagtttcactctcgtacagcacacactcatgcagattgttccggtaattttaaaaattttaagagtaaacatcaggtctagcaaggtgcctgaatgggtaaagacacttgctggcaacctaagtttggtcctagatccctcatagtggaatgaaagagctggctactagaggctgtctgactacccacaaatgctccttctctgcactaaataaacaaaatgcagtaaacaagaaataaacagcagctgagggaatccctgcagcgaagcacagtcggtgggaaaaacagtcgctatgagaagagctggggaggttacttagcttgcttcttaaagggctaacccagtggggctggctagcactggcaaaagcagtttaccgagtgctagtcttgactggattattgtggtaaatcctgggcttgcagattttaatacagcttagtaaagcattgaaccattatcctttagagacctgaaataactccttatgtttatcccatgagtcaccacaaggcagtccaggaaagacagcaacaaaaagggatgtattgtgtttaaatattcactcagacttgcccagcttggaaattatttttgtagcagagaaagtaaacagtcaatagtcagcaggttttagataaatacacatgtccatcaacacaaattttcatgctttacacgtagctaactgtgtttgtgagttatttacccacttatcagcttccccaccccctatccattcatcaagcatccaaggaatgcctggtatgaatgagctaagaccctcctagacgctgaggacaggaaggacacatggctgctactcctatcctagcagatatcctctgagtcagagaggtgtggaagggagaaaagaaagaaaggggcttgatttagggaaaactcaggaaaccgtttgtgagagtcctgttggaactggtcttttgaaaggtagagtgctgagcattcagtggggtgtggacaagtcccagcagacccctggaaagccatggaaaactgtccagctgagattaacatcatcggatctgtcctcagcagtccctccctcagtaacacaaacaccttgtgtaatgatactgcgtgttcatcggagaattaagtcatagaagcagaagaggccccttttcagaaacccatggtcaagtctctcagctttagaccaatggtatgaaagagactgtacttccaaggagccactcagactgtcaaagagagtctgagaagagatagagctgtcccccatacccagaaaggtccatgtgcctagaccctacccaaggccaggggcaagaggagcttacagactcagagccaggttattacccaaaaggctgtgtgaaggtaggggaggcagacaccaactctaacagtggctcctgatttaaaccccgaagcagaatggaaccgttgagggtagcactgaaatgtccagcatgttccctgtgaagtgaagcaaatctgacattcaaagcatagagctggaactgcagcttgtgttcataaggtgtcttcttggtggtgtcccagtggacacatggagccctaaggctgggcttgtggtatgtgttcatttgagagatgctagcccttttgtatgatgtgcaaggctacagaatactgaggacatgtttagtaagaaatagaatcccagggaaaacatgtttgttgagtcagataaatgccatacatctggttagttgagtgtgctgagagattgaaacatcacatttttgactgcttaattgatcaccctcactggagcttatgaagcaccacttgcaaactagcaatattgagagtatttgaaacttttataggaaaagcaaagttttgtcagttatttaaaagatgcacttatttagtgtgtatgtatatgtgcttacctgagtttatgtgcatgaagtatgtgcagataccctggagttttagacagatgtggtctctgatgtgtgctgggaatcagactgggtcctcggcaaggacagagatgttcttagccagtggccccagcactggtgatttaggagtacctagtgttaaaacgtgaaacactaaagcactgtttatattttatgtttggattccatttaccatgtaactagaatctgttctggggaacattgaggtccgttgccttctgctttttagcttgccttcccctgcagagggattaaaaaactggttgaagagtgattttttttttttaattaaatgttgctaattaaagaaattataacatatgtgtgtattttaagcctcaaagaagtaagtcgttctcctttcctggggcagctaataaataactcatttgattttttttttttattccccttgtagtttatgcccattttcttttttatattaaggtatccttattaatcgtttaggctcttccctttatgttctaccctggatagctgggtgtttcagcttctaatcttaattcctgtgtcttctctttgtaatcagcataatgtttttttaacttgtcctgcttatattttttttcctgaaatacgtaattgtaccaactagaaagtgtctgaagtgacctgaagcctgggctcggggggataaggagggcctgaagtaaaggaagccagcccatcccctacctgcctgcttccctgcatcctgtcccatgtgctgctgcactgtgtctgtcctgcatcttctctctgaccagtcacactcaagcagcagacgatgacctgccgggtagcagccacacactgatgttcaaagggaggggaggggagcttgctttaatgtagaagtctgcacaccatccgagctgtctctgatcttctgccatggctcgtcctaacactcagcttgcctctctgagcagcctagacagaacaagtttttacaggtacaggaggagagaacattgggagaaaggcagttatgtgccctagtgtggaggaagtcggggtgttcttaaagagtagtaatttcccacaattgacttgaaaagtcttttacttcccaaattaaggtgctctgtggcccactttgtctcggtggctccatagttcagaattcctgctaactttgaagctcgacgtttcgagctgtaaaaagagcagccgtgaccaggttgaggagtctgcctagatggacagcctgctgcaccagtcagctcgtgcctcacttttgagttttttaaaaaattgcaactagattttaattccttccagtttgtcatgtggaagcttgtcactgggaacacttgatggacatgtctcctgaagagatgtggataaatctgtggtctcacacacacctgaaaagcaaactccctcctggaaccctggctttagacttgatccacatacagcctggggcaagtcatttaacatttacctcccttttgccatctataaaggataaatacttctgtctcagggatgttgaaaggattaattagttagtctgtaaagaactttgaagatgaaaagtgctttaaaagtgcttcttaataacgtgatcgcctagaaaagagcgccacttttctgctaaccactcatgcctcagactatgaaacgaaggtgtgcttagcacgctacaggtagctataaagtgcagtgaacttctcatggtgtgaacatcaaaccttggctttaaaatctcaaaggaacttcattgtgtagtagctccctcaagagcagggatccacttgtaatcagtcacagagattattccaggggacaggatgcctctcacaaactgccctgctccttgttctatcaggttttttgtagggactttaagaggtcctcagtggggtctctcaagggaaggtgggagatggaatgagcttttattttatttttgtgcactcacttggtttgaaaaggaagaaagagaactgcaagggaaacagcactcttcctttctggttccctctgctgtgctctggagcaggcagactaggaaggctaaagcagattgcttagaattcaagaccagcttgcactataaagaaaaaagtctttgtcttagtatagatgcagcacgcgcacatacatacacacacacacacacacacacacacacacacatacacacacgcgctctctccccagcattggaagcacataaggatttttcagtataaagaagaaaattacagatcaaccaacagttacggagatagccattgtataaagaacctagaatagtttagaaaccctcatcaagaagtaaattgagattcaattctggaacagagtgtcaaaaccttaagataccagcagacatctcaatggaaagaaatcaggtagaatttgctcaatatgtaaattgtttctgttccctgtcagtgtgaacagaatttgtgttcggttgtccatgcagaagatggggattgactaaggttgatgaagaaaaactaaaggtgttagagaccccctgtgactggaaactcgacttgcacccagttccttgtaggaggtgaacaagggactgcatggccacccacctcgctggtttaaacatagagtgacctagaatcaccatcgctgcaaactaccccaggagaacacaggccagaaacattgctccttgcattttagctccagaattataatccagtgagctaagtggcagccattgaggttgaggtcctcaactattgaattagttagtgtttttgtcagccactgtttttacagtgtgcttatggaaaatgacagtttgagggcagctgactctgggctctgctagacaagggttactatttatcatgtgcatgaaagacttgttcatatgatcagtcctaattaaaccttattccaaatagtcaatcaaagcatgttaatgaatatgttgttcttttaacctcctacagcaaaactctggaagatcgtttgaaacttgaagcaaaacatgggacattgaatgtatcggacaccactgttggcagcaagcagttgacatttactctcaagagggtgagtagttccatgactttatttttaattcacacagaaaagctctaggtatgtgtatggctttgggacctctctcccaagctcttctcattgagaaagctgtgttccctactccagtgtttcctatagccagagccccagctgggtgacagctacagaaaaacagtcaagggggaaaagcctcatgctggaggcagccctgcttggtaacctatgttcctctgggtctctctggcccatcgtacaacctagctacacaagagctctgtctgagggaacaaggaaggggataaacacacccagtacttacctagaaaggactaccaagagacttgcccagataaagtcatttcccagggtgatttctcagtcagtgataatctgttttaaattgtcttgaagatgcttttccttctcccctcccctcctctcccnnnnnnnnnnnnnnnnnnnnnnnnnnnnnnnnnnnnnnnnnnnnnnnnnnnnnnnnnnnnnnnnnnnnnnnnnnnnnnnnnnnnnnnnnnnnnnnnnnnnnnnnnnnnnnnnnnnnnnnnnnnncccctcctctcctccctccctgcctccttttctctctctctctctctctctctctctctctctctctctctctctctctctctctcttttagatttttggcaaaggtggggtttctctgtgtgtatctctggctgtcctgtaactcactccgtagaccagactggcctcaaactgagagacccaccagcctctgcctcccaagagctgggattacaggtgtgcaccaccactgcccggcaaagatctatttcttatgcgcactgtagtgctaatgccttttgcacattgtgggagggactaagttgcttaagtatctgccattaactaacaactaaaatgacaggtgtcttttctcaaaaagataattttctctttctcagtcagattcctcaacaaagtcatcaagtacaaaaagggtgtctgcaaaagtgattgccattccctatggctgcttctctaaactgacatgccacttacgtgccataaaatccctcgaggttttctttttctcaatatacacaggaggagctctgtgtttcacacaagaacacacacttagcagtgtggttcttgcagtgttctaaaactctgtcagtctgtaatgtattcttttaaatagatcagaattttaagctaaaaccacttgatacattagcctttttctcctgaaatcaaatgagcagagtatgacttgtcaacacaaggcttattgtgtaacagggctttttgttagctttgttgtctgtaatctataaggggcaagtttgtgtcacctttgaaacaggatccatctctaggaacagatccacagtttctctgtgtggctctgcccgacagaccgcagggcagcactgctcctattccataatcatagcccttgtagccccggtgaggcaggcacaagcctgagccgtctgagctgctcactggtcagttctttccgtgaagttggaaaactcgacagaaaagggctactccctcatgctctcttttctttttctctcctaccgcttactagcggttccccaggccaatgcacatgcaggtaacactacagccaaactccatccccacactcaacaagccaatcagtgctttctagtatgttcagtagatctgtaaccgtcccactcgaagcttttgtctcagagctggggagatagctcagtgggaggatgctggtcacaggcctggctctggcagtgagaagacgcagtcatttccacgccacagaactttcaagtcagaatgcacaaagttgaatgccattttgtaaatttgtagtaaaatgaaaagatggggagataccctgagacttgcttgaagtgacatcagagctgaatcaactgtaggcttcagaaccctttgggagaatatgctatgtcaattaatgcttgatttatgagttttattacttgattggcatgctcttaactatttagtatatcactgttaaatatatatttagaaacatgtttgtgtatttgtttatagacgtttccctttgctctatgtttattgtatatgatacactgaggcaaaatcgtggagttgcccaggatgtctgtaggtgctttctacagtgccagtagaattcacagggagaatgtgtgtatgtctccacagctagcgtctgtcctctcccctgccccacgagggctgtaggctgcagctgcacaggaacaaggagaaagaggaaagctgacttggaaaagagctaattgccctgtaaatcttgatgagtgggtgacacagtggcatggtctcccagcgcagccttggggagagaggctaatgatagaccttgtgtgtggggagctttgtccacagaacaatagaggcctcttcccagctcctctggcagctcttggcctggagaaggctgagaagctgtccagagctgcccacagtcctgcttcatactgtaacaacaggcccacactccaaaaatccttagagctcccagcatcctgtctatctggattcagcacatctaaagacatgcattttagctgggcagtggtggcacatgcctttaatcccaacacttgggaggcagagacaggtggatttctgagtttgaggccagcctggtctacagagtgagttccagaatagccagggctacacagagaaaccctgtcttgaaaaacaaaacaaacaaaaaacaagacatgcgttttagaagccagacctggtagtgcatacccacaaccctaatctgctcttggggctgaagcaggaagatgatgagtgtgaaggtagtctagcgatgcagacactgtggagggtggggaggattaaggggaacttattaatatgtagggcagaatatgcttccccctcttctgcccctgccccccccaaagttctcactgaaacaaacgcagagccttattcatcagaattaaatagttgtgctaactctgtgagggtcttgatgatgtgcagtttagtctccagggcagtgtagtcccgaggttccagagtctccctgttaacacaggaaaccagtgcagtgctctgactggctgcgaggctcagcccattctctctgctaaggaaatagggcaaatgacacttttaccaaattagcccaaagtaagtgctctggtggaggaagtgcctgtgagctcatggcaaagagtctaagcagtgtgttaggaagcagaggcctgacatacagtattttctatatatttgtgtgtgtccgtgcatgggtgccatgtcatgcatgtggaggtcagagggcaacttgagttagttatttctctcttctaccatttggcccccccaggtgatcaatttcagatcaccaggcttggtggcagataccttcacctactgagccacctcaccagcctgacgtaatgttgaccataggagtgaaccaggaagatgtggttacatctccatcccctactccacccagtgagaaagggacccttgaattgcagagggaggctgccacctgaattggaagggcatactgggcagggtttattttgaaaatgcacaggatatattggtcatcagaaatgaacctggagtaatataggaacccaagctaccagaatgcagagatgggccctttgtgggctcaccatatcgtcccacaccctctctttaaactcagatggttttttcaagagggaaacactggtgaatatctatctgcattttatccaagtgtgctaaagctccaagtgccaacagcaagtattggtatggatttcagactccttagctcctctattcagtaggttctgcactgattgtctgctgagagtgggggtgccactggaaagaaagtgggatctgggagcattgccacctctcaagcaaatgaagatagaaaactcatgtggagaccatccctgccagactgccaggggtcaataatagcaagtctgttcttcccctccttcccttcctctcccctctttctctctccctccctagcatccaaaagctctttggagccagccctaatgagttatctaatcaggtgtaggtcataatgcactttaatatgtgtgtgataaaaaacacgtttgatatgcatttgataaaatgcaacattttttgtttgtctttaagtctgtgaatgaattcagagtttcagtgtgcaagcagaagtaggcatgagtcctcttagagcatcccggtgtgcggacacttcccggtgtgtggacagacacttcccggtgtgtggacagacacttcccggtgtgtgtgttctttttgcccagggattcagaatttctcctttcacagtgaaaattgttctttgtccaactcctgccgccaccaggacgtgatgctgagctgcacagtgttggtcgcaggactgtgtgtctggcagcctttgctcctccctgagggttatagcagaccctttcctctactcacctcactttcttttagtctgaacagcaaaagaagcaacaggaggctgaaaaactgcatcgtcaggaaaggaaaaagctgcgcaggtcggccagccacctgaggtccagacccagaagaggccggccctttcactgaccaaagaaatgtgcccacgagcaactagacgctgtgcttctccccatggattctcacaagggcatcacacccaggctccgtgtagatgtgtgtgcatggtgctggtggtctgactggcccactacccacctggagaagtccctggccctgggtgctttttccaagtggctgcccctttctcttccccctccccctcccgcccttaaatcttgtcttctcccctgctgatgatcaggcatcatttcagatattggaaaggcctccatgaagtgaaaagttcaccctactggaaacgggacattatcatgctgtaagaatggcttgggttagcccagccgtggtggcgcacgcctttgatcccaacacttgggaggcagaggcaggcggatttcctgagttcgagaacagcctggtctacagagtgagttcccaggacagccagagctacacagagaaacnnnnnnnnnnnnnnnnnnnncaggacagccagagctacacagagaaaccctgtctgccccccccccccccccaaaaaaaaaaaagaatggtttggggttttttgttttgtttttttgtcatttgtttatttgagacttgagtcagggtttctccgtgtagctctgggtgttctggaattcaatctgtgccttgaactcatagagatccacttgcctctgcctcctgagtgctgaagttaaagggatgcaccaccaggcccagccagagtgtctgtccccactgtcttctgcccctcaggactgagtcacctgatgactgctgagtggccctgtttatgtgcatgagtatggtatgttggcaggctgactggcttgcttatattcctttgtatagtttttaagctatttttatatcaagggtataaattaataaataataagtgaacgctactggctatttgtttagcttatcacaaaattacgtagttattttctgatgaagtactatttgatacaggcagcgcctataaaaggagatgcttttctttggacattttctctgaggaagactcctgcctgtggaaatgtaaaattcactttagcttccatactttggagtttctcatgtaaacaaatagaatgggagctcgttaggctgtacctatggtgagtccacaaggcagaacacattagttagcagtcagtgttgttggacccttgtctctttagcctgtgatgtgtactcaagaactttctgactgttggtacatgaatctgcacatgcgcatgcacgcacccacgcgcacacacactcctacctctttattaactattaagcagatccctcctggggctgtgagcccctggtgccctctcttccctttctcaaagtttcccattttaaaattgttgtgcatgctggtatcccactctgtcatttttcagtgtttatatcagttgcttttgtacagctatcaccaaaataatcaatatggacttaagggattcatcttggctcttagtttcagagggtgtcagggtgtgcagatgcctttcacatcactacaggccaggaaatagaaacccagacatggccttaaaggacttgtctgagcaacctgtggttgacctctgccagctagcctccacctcaaagaacatccccacacatcctaactactatctggggacagatgtttaagttagaggcctgtgggagacatttcaggctcaaaccctaacctgtgattgttcgttaccagcactaggatgtggctttgtccagtcctgccagcagctgtccttcccggtgagacttaggagctagtgtgagaagtgtagcaccaaagctgggcaccaggccctggaggactggggttcctgagtgatgtgtgctcttctgctccagatccctctcaaagctttagtatcccaatcccaatgcctaaatcttctgtttcaagtattttcatcagtaacctttgaaggaagcaggcatgctgggaggggcaggattaacacagggcagacagcagaaaatacaggcccaggggtgcgggacttagaagggcttctgggaagaagattgagttcagatcctttcctcagaatcctcccctggttctcttctcatccagtaacatcctgagtccctgaaggaccctgcctggcacagactcctttgtttgctgtcaccacactgaccttcctctttctagaacattccgggcattccctcagctccccacgctcccccaggcctctcaagttactttctctcctgtctggtcaattctgccccatttacattgtcacatcccagtgtcagcatgtgtttacaaatggtactccatttaatatgctttcaaaacatcaccacggggaccacagagtcttcttgagtggaagaagaaaaccaaatacggtaaatcatatctgacctatacatgagtatacatgctcatatactcatgcacacacatgtgcacacacacaaataagtatagcataaatttagaaccttactatggaaagtgtcgggtacacacaagaatggatggggaacagtcgagtagaccagcatgccccagcagtgtgcaacgtgctcacggtgagttctcagctagcttgtccagtgtcagctcctgtttccagaatgccaactcaatgaggactagggggaatgttttaatcagtatgttttgtttgtggctgtgtatctaatctctcgaacaatgcctaccacatcatgcaatgtttatttaagccgttatggggtgcccaccagagaaaaccactcagacgtagtccatagctgaacgaaagtgttttcccagccaatggtgactgcactcaggtctttgaggcccagtacagcaccaagcttttagcataaggggtttttaaggcaaaaccacatcctggtatctcacttggcagctgcagggagagagctgtacaagcaagcagtgtaacagaagtcaaggtaaattagctggagcatcttgacctcttagagttggtaattatttcccacaggattctccatggaggagagcaaattctagttaaacctaaagtggcctcagcaagaagacaagctagaggaacgctgtgttctcctgccctgtcacaaatgactgagtgggatggaattgaacattcaactttctactttttttttaattaggtattttcctcatttacatttccaatgctatcccaaaagtcccccataccctccccccacccccctacccacccactcccactttttggccctggcgttcccctgtactggggcatagaaagtttgcaagtccaatgggcctctctttccagtgatggccaactaggccatcttttgatacatatgcagctagagtcaagagctctggggtactggttagttcataatgttgttccacctatagggttgcagatctctttagctccttgggtgctttctctagctcctccattgggggccctgtgatccgtccaatagctgactgtgagcatccacttaggtgtttgccaggcaccagcatagcctcacaagagacagctatatcagggtcctagcagcacaatcttgctagtgtatgcaatggtgtcagcgtttggaggctgattatgggatggatccctggatatggcagtctctagatggtccatccttttgtctcagctccaaactttgtctctgtaactccttccatgggtgttttgttcccaattctaagaaggggcaaagtgtccacactttggtcttcgttcttcttgagtttcatgtgttttgcaaattgtaacttatatcttgggtattctaagtttctgggctaatatccacttatcagttcaactttctacttaatgtcagactttaacctttatgcctgaggagtgattcccacctgagctttcagaaatgggatgcaaaaagatgaaattgcaaaggttgacagagggacagggaaaaggaagttgaaaatatacattatgaataaataacccttaggggaaagtttagcataaggaaacagaaatggaacttatgtggtcaagagggcatgagagaagggacagtgtgtgggtgagggactggctggtgagatgtctcaataggtgaaggtgcttgctaacaagcctgatgacctgggttcaggctctgaaatccacatgggagaaagaattgactcccgtaagatgtatttgagtgtgtgtgtgtgtgtgtgtgtgtgtctgtctgtctgtgtgtgcttccacgtgtgcacacaactcaagtaaatgttttagtaaaaactttttgtaaagaagaaaacatggcattagagaagttggttcctgatctgtgtctgtaaatggatggcgtgccgcatactttgcagtcaactaaacaccactagggtcattttcaaagagaacctcagttgagaaagtgtccagcagtgcccagtgagtgggcttccatagaggcttggcagcctggaatgggagttgcaggaaggtggaggcctgctgtgctcctgggcttcctgactagtgagatgccccaacacctcctgccccaacacacacacatcagatggaagaggaagttctcatcctttgatgatccttgctcccagcccaacccaataggacttcaaagctgacaggtgggaaggagtccagctatatacttgaagtaaccttgagtttcttttagacgtaggccagaatgatgcatcctagacttgggagttgagggggtttcgagtccagctggccggaacacctccccagttggatttccccatccggcctccctcagttcactgcccagtttctgctcacacacctggttgacccgggggcagctttctcttcctctaacccttcttgagttctgcaaaatgggtggaatgttggaatctctcctcctcagggccccactctgctcctctgttggagctccactgtgtccctccagtcttgccaagcttcccttgcctggtctgtggttgcctcttaatgaaacttttccttctggacttagtgctacacccccctacacacacacacccatcccccattccctttcacactgcacttaggctctgaggtccttccccagctcctcttctcccctccccctccccctcctctgtattatggtcctctggtccctcatactcagaataaaattcatcactgccccccctccttccctgccccgccccatgttatctttatttcctcctcaggcccaacagcaaagccatgatttgttcagttgattcactgaccgctccttgcaagtaactaaacagatggatgccctgctctggtgcagtttctgtcttcaccggaaagcagaagagtcacaagaatacaagcaatatagacaagcagtggtgtcagcatcgggaatagggacttagggatccagcataggcaggaggatccttaagttcaaagccagcctgttctacaaagtgagttccaggacagccagaactatacagagaaaccaaatgaagcaaacaacaaaaaagtttagggctggtgaggtgagataactcaggtggttaagaacacttgctcttggaggagctagagaaattacccaaggagctaaagggaactgcaaccctataggtggaacaacaatatgaactaaccagtacccgggagctcttgtctttagctgcatatgtatcaaaagatggcctagtcggccattactgcaaagagaggcccattggacttgcaaactttatatgccccagtacaggggaacgccagggccaaaaaggttgagtgggtgggtaggggatggggggtgggtatgggggacctttgggatagcattgaaaatgtaaacgaaaatacctaataaaaaaataaaattaaattaaaaaaaaaaaaaagaaaggaggaggaggaagacatgacaggcaatacaatgagtagtgtggaataaggctgaatgaaatcggaatcgaccccagggcatacagcagatgccccaggaagacctgtaaaacagttctgaagccgtagagccttacccaggaatcccagagctccagcacagactcaaagggcaactttgctgtggtgctcagggaggacagagccttggccagtgtgactggcacaggacagaggacttagactagaacaggaatggcttgatgtcagcattgtgggccctaggacatcagaatggctgatgctccagtcttaggtcatgtcacccttacaggtgggtgtgccctctgcagatcttcccatttctgtggtcccatggccacaagccctgctcgccgtttttcctctgtaccacatcagtgtttgtacatagatggcagagtcagggatccccagaccaggctgtgagaaactaatcctttaatgatggagggccttccaaagctaacatggagtctgtcagaaaagacaacagaggaaacaagaggagacctgggtctcgtctagacttgctcaaggctaagttgccagttagtggcacagccacttaagactgctattccttggtgtgtgcatctgtaaagtgggtttaatagtatctgtcccctgaagacttcagagagtgtttgtggagcttaatgagtgaggtccattaaagccctcaaaagaaaggtggagctaaatacaaagcagtattgtaattaccctgcatgttctctgagccaggtcacatcttgttttaagagggttaccatgacgatgggtttgctttaaaaacttgagtttcaaaggcatagctgtaagtctccagtaaggagtgaatttcatttcattactttttgtcatggggtgggacagaatctcacagctatttagggactgtcatggtgtgacagctactgttgctgctgagtggcaaagaccttgcttgttacccgtcctgagcacctggcgagtcttaatgaaggttattccgtcagtaaatccccagcacacccaacatgccacaggcaggctgagggtggctgttggctgcgtgggggtgacacatgttttgctagaaacagaatttgctagaaagttgttacctggagttctgagaagctgaggaccctccatggtctgcagttggcaagctgagatccaggacagctaatcatgatagacgctgcagttcactggtcacagttgcagacctatgaagagctgatgttttagacccactctgcctacaaaaagggccagtgctgtcccagctggagggcattcagcaactcccctcaatccactcaggccctcaatgggttgggtgagagggagccacaggtcatagacatctctatccagtgtgtggacggggccctgtcaagctgacatagacttcctatcacactgacgtgtgccaaatccagtaacatgacaggcctggagctaaatggtttccatgccatcttgtccgatgctactcattgatctgaggctaagttctttcctgtctggacccccatgtcctcacctgtaggatgggactaggaactgtatccacctcacaagtcaccctcagtcaaggtgtcaacagcaagccagctcaccacccttgtgtgtcacaggaggtccagacctttgcccaaggcccgtttctcctccacaaatcaagacccacaggcccctctaagaccctattggattatctctgcagtagtcacctaagggtctgggtcacctaaggccagatgagttgccctgccttctcgaatactgcaacagcatccctactgtcactgctgtggtgactacggtaacagagactgggatggaggagggtggagcagtgagcacacagctggtgggtctgaactgaggtaggtggcccagcagcctgcacagttggtgttaatggaatgtgggtgtatggaaatcagagactggaggtgtggctcaactctgtttgatttctaatatctaaatatactaaaataaaatgaaagtaaggaatttagggaaattttggccagtcaaaagcagctggtgtgagtttggtggacagttaccacccgtcaggtaccacacccgtcagtggtggcagttaagagtcctcccagcctacccctaagagtcctcccagcttatccctgtgttttaggccaagactgaaaatatgtgagagcaaacaaactctaggtgtcatttgccttctctgagcattgttttcctcgaatcaaacctgaagtgacagtcctacatcacagggtatctggcgagtggcctgcttatcctgagcagcaagatgtcagcccccttctccaccttccctcaggacccaggggagagtgtcacgcagtaagttcttcctctactgaggctcatagaacctgtctgtggatcagtgagcatttggccctgaggagcctgccctctggcttcagcagttaccagcgcagtgtttcggtgtgtcagtgaagaaggtttgggaaccagctgtaagactcaggaatcaacactgaatttagaaatgaaatttcagattagagaacagccctctgagccgggcggtggtggctcacacctttaatcccagcacttggggggcagagacaggcggatttctgagttcgaggccagcctggtctacagagtgagttccaggacagccaaggctacacagaggaaaccctatctaaaaaacaaacaaacaaaagagagagagagagagagagagagagagagagagaggagaagagagagagagcagccctcttaattagtgacactgatgaggatggtgaggtcaggatcagagataagcaagggctgctcctgcccacgcagctcctggtgtggtgtgtagtgagattttcttaccttgttgctatggaatcgattctgtgtacctgaacttaatggggcctcatagagtcctcccaagcctcaaaagctagagccttgaccaaaagccagtctggagcactcactataagtggagtactcaccacagcagagcactcaccacagcagagcactcatcacaaacagagcactcatcacaagcagagtactcaactacagcagagcactcaccacaagaggagcactcatcacagagcactcatcacaagcagagtactcaaccacagcagagcactcaccacaagaggagcactcatcacagagcactcatcacaagcagagtactcaaccacagcagagcactcaccacaagaggagcactcatcacaaacagagcactcatcacaagcagagtactcaaccacagcagagcactcaccacaagaggagcactcatcacaaacagagcactcatcacaagcagagtgctcaccacaagcaggtttgctgctctgagctcacgaagcacccagagagactgcttaccgtgactggaggactatgcagccagtagaggggcttgggctcatgtgtgtgggacttggccacatctgctatgctcactgaaaggacggagagcgccccagtatgtctgtgcctacagcactccaagggacacagatctgtgggtaaatgtccccactgcaccttgggaagatctaagtgacacaaagtgttggagattcagaaactcaggcttcacaggtaaaagagagagacagagtagatagagctggagcccagttggctgagatgctgcctggcacgtctgtgaggtggctgaattccaatgggggacaaagaaataattggcagataaatggcaaagccggggtttaaaagcagtgaggctaattggcaagtcctggggaccggacagagcaatggcaataaagccccttgtgtggttaggacctacagaggaagtatacttcagagagaactggctgaggccagctcagaacactgaggctccctaacagaacgtcctgcagaggggagaaatagaagcagaagcaggaggcctggcctgggtgggacttcactggggaggtcagatgtggggagagccccctttattggggcactagctggtgaagagtctcaagcctggattgttccagtcctgtgagcttctcagcatgaagggaatgagagcaagacactttttgaagagtcactgaagacatttctgctgaaaaattgtgatttcccctcaggggttggctttacaagtgaagagccattgcctttaatgtaactaagcagagctccctgttaaaagaggtaaggagagaggcagggaatgtgtgtaccatgagactgctatggcttgcacccacatctcctctgagtgcccacagcctgggagttctcagggcacattcagtgcatagggcaccatcctagagtggtccaccccaccccaaccctactctttaacatcttagctccgctcttgacaggcctagctcttgacttaaccctcactttagccacccccagcaatggcaggttcccagaagaacactgagtgcttgactcctggccaggtgatactaggtgaccacggtgataatgggcaaaggccaggagcagaacatgtatgtccccttcctggggagcggaagccatcaacctgcctgagttaggtgagggctaccaactattcaggcaagggttcccagtaaccatggcgatcccattggaaacgctgccatgccatcctgtgccctcacccgcagaaccccaaggaccgtgatgaccacacacactctagggcaatgagcaggtttataccagggtttgcatttaactgaggggacagaggtagcagtggggtatatcggaggagaagagatgggatgcccatctggatattattcttatccttcctgccagggccccagtcaggcacatgacatcggtggacttggaaatattgatagagaatggagctgaggaagtgggacagtgagaacgttccacagggcttggggcagaagctgttgctcctggtaggccttcagagctaaagggaaaagaaagaggaggctgaagccc

SEQ ID NO: 54 - DNA, 3067 bp, Mus musculus
ttcccgcacattgtgccggttcgcctcgggtttggatgctggggtattcgggtgggtcggcgttctgtgactgcgtgccgggctccggctgctccgcgctgcgatgcaggtctccagcctcaacgaagtgaagatttacagcctcagctgcggcaagtctcttcccgagtagctgtgcctgtccggcatgccctgtgctccttctctgatgctcgtgtggaacaagtttccatctctcccccttccctcttggcagatgttcgtaggagaattgaacttattcaggacttcgaaatgcctactgtgtgtactactatcaaggtgtcaaaagatggacagtatattttagcaactggaacatataagcctcgggtccggtgttatgacacatatcagttatccctgaagtttgaaaggtgcttggattctgaagttgtcacctttgagattttatcagatgactattcaaagattgtcttcttacataatgacagatatattgaatttcactcacaatcaggcttttactacaaaaccagaattcccaagttcggccgagacttctcttaccactatccatcctgtgacttgtactttgtaggtgcaagctctgaagtttatagattaaacttagaacaagggcggtacctgaatcctctccagacggacgccgcggagaacaatgtttgtgacataaatgcagtgcatggcttgttcgccacaggaacaatagagggtcgagtggaatgctgggatccaagagtaagaaaaagggttggcgtgttagactgtgcattaaatagtgtcacagcagattcagagataaacagcttacccaccatctctgcattgaagtttaatggagccttgagcatggcagttggaacatccacagggcaggtgttgttatatgatcttcgctcggataagccgttgctagttaaggatcaccagtatgggctgccaattaagtcagttcatttccaggattccctagatttggttttgtctgcagactctagaattgtcaaaatgtggaacaaggactccgggaaaatatttacttcgttggagccagaacatgatcttaatgatgtttgcctctatcccagctcaggaatgcttcttactgccaatgaatcccccaagatgggcatttactacattccggttttgggtcctgctcccaggtggtgttccttcctggacaacttgacagaagagttagaagagaatccagagagcacagtgtatgatgattacaaatttgtcaccaagaaagaccttgaaaatttagggctcacacatctcattggatcacctttcctccgagcatatatgcatgggtttttcatggatatcagactctaccacaaggtgaaattgatggtcaatccatttgcttatgaagaatataggaaagataaaattcgacagaagatagaagaaacacgtgcacagagagtccaattaaagaaactgccaaaagttaacaaagaactggcacttaaattaattgaagaggaagaggagaaacaaaagtctacgctgaaaaagaaagttaagagcctccctaatatcctcacggatgatcgatttaaagttatgtttgagaatccggacttccaggtggacgaggagagtgaagagttcaggcttctcaaccccctcgtctcgaggatcagtgagaagaggaagaagcagctgaggctcttggagcagcaggagctcaaggatgaagaggaggaagaaccggaaggaaaacccagtgatgcagaaagttcagagagctcagatgatgagaaaggttgggttgaagaagtcaggaagcagcgcagactcctgcagcaggaagaaagagtgaagcggcaggagcaactgaaggaggaccagcagacagtcctgaagccccagttctacgagatcaaagctggcgaagagttcagaagcttcaaagagtctgccaccaagcagagactgatgaacaaaactctggaagatcgtttgaaacttgaagcaaaacatgggacattgaatgtatcggacaccactgttggcagcaagcagttgacatttactctcaagaggtctgaacagcaaaagaagcaacaggaggctgaaaaactgcatcgtcaggaaaggaaaaagctgcgcaggtcggccagccacctgaggtccagacccagaagaggccggccctttcactgaccaaagaaatgtgcccacgagcaactagacgctgtgcttctccccatggattctcacaagggcatcacacccaggctccgtgtagatgtgtgtgcatggtgctggtggtctgactggcccactacccacctggagaagtccctggccctgggtgctttttccaagtggctgcccctttctcttccccctccccctcccgcccttaaatcttgtcttctcccctgctgatgatcaggcatcatttcagatattggaaaggcctccatgaagtgaaaagttcaccctactggaaacgggacattatcatgctgtaagaatggcttgggttagcccagccgtggtggcgcacgcctttgatcccaacacttgggaggcagaggcaggcggatttcctgagttcgagaacagcctggtctacagagtgagttcccaggacagccagagctacacagagaaaccctgtctgccccccccccccccccaaaaaaaaaaaagaatggtttggggttttttgttttgtttttttgtcatttgtttatttgagacttgagtcagggtttctccgtgtagctctgggtgttctggaattcaatctgtgccttgaactcatagagatccacttgcctctgcctcctgagtgctgaagttaaagggatgcaccaccaggcccagccagagtgtctgtccccactgtcttctgcccctcaggactgagtcacctgatgactgctgagtggccctgtttatgtgcatgagtatggtatgttggcaggctgactggcttgcttatattcctttgtatagtttttaagctatttttatatcaagggtataaattaataaataataagtgaacgct

SEQ ID NO: 55 - protein, 735 aa, Mus musculus
FPHIVPVRLGFGCWGIRVGRRSVTACRAPAAPRCDAGLQPQRSEDLQPQLRQVSSRVAVPVRHALCSFSDARVEQVSISPPSLLADVRRRIELIQDFEMPTVCTTIKVSKDGQYILATGTYKPRVRCYDTYQLSLKFERCLDSEVVTFEILSDDYSKIVFLHNDRYIEFHSQSGFYYKTRIPKFGRDFSYHYPSCDLYFVGASSEVYRLNLEQGRYLNPLQTDAAENNVCDINAVHGLFATGTIEGRVECWDPRVRKRVGVLDCALNSVTADSEINSLPTISALKFNGALSMAVGTSTGQVLLYDLRSDKPLLVKDHQYGLPIKSVHFQDSLDLVLSADSRIVKMWNKDSGKIFTSLEPEHDLNDVCLYPSSGMLLTANESPKMGIYYIPVLGPAPRWCSFLDNLTEELEENPESTVYDDYKFVTKKDLENLGLTHLIGSPFLRAYMHGFFMDIRLYHKVKLMVNPFAYEEYRKDKIRQKIEETRAQRVQLKKLPKVNKELALKLIEEEEEKQKSTLKKKVKSLPNILTDDRFKVMFENPDFQVDEESEEFRLLNPLVSRISEKRKKQLRLLEQQELKDEEEEEPEGKPSDAESSESSDDEKGWVEEVRKQRRLLQQEERVKRQEQLKEDQQTVLKPQFYEIKAGEEFRSFKESATKQRLMNKTLEDRLKLEAKHGTLNVSDTTVGSKQLTFTLKRSEQQKKQQEAEKLHRQERKKLRRSASHLRSRPRRGRPFH

SEQ ID NO: 56 - DNA, 141079 bp, Homo sapiens
  misc_feature (1)...(141079): n = A,T,C or G
tttgtttgttttgagatggattctcactctgttgaccaggctggagtgcagtggcgcaatctgggctcactgaaacctctgcctcccgggttcaagcaattctcctgcctcagcctcccgagtagctgggattacaggcaagtgccaccacatccggctaatttttgtatgtttagtagagaccggggtttccccatgttggccaggctggtctcggacccctgacctcaggtgatccacccccctcagcctcccaaagtgctgggattacaggcgtgagccaccatgcctggcctgactttgttcttttttaaagtgttttgagaaaaaacactttgcattcctatatacattttagaatcagcttgtcaacttctatcaaaaaaaagattactgagattttggttgtgggattgtgttgaatgtatagattaatgtggtgaaaactggaatcttaaataagtcttatcctgaattgtttacttatttcccctattctccaactgtccaccaaaacttcctcttactgatgtatattgtgtcttaggtagagtaccattatctactatcctggctgactttataactgggaggcacttttaacttcgccctcttcctcagccctaacaacaatctttaaggctggctgaatttgccccctaaatcttactggattcattcatgactctttgtccccatgactgctatgctaatgtaggccttcctcgtttctcaccggggtaactgcaatcacggcataactagtttttctgctctaggctggaccctgcaaatctactttgcactcagcctcagaaagatggctcttgcaaatctgaccacgccactctggctcaaagcccatgggttctaagttgcagtcctgatggctttgacctgagatgcagcgtgctcatgatctggccctttcccacccttcagttgcatttcctgatattccctgtactctgttctttctgaaagtcttgtgactaagaagggaccccacagatgaataagggtcccttcttagtgtgcccataatgctctgtacacaggaccagctacacaatttcaagaacctagtgccaaattaaaacatggggccccttgttcaaaaatggttaagaatttcaagaggtgacagtagaatgttaaaccaagtgtggggcccatctgagcagggggaccctatatgaccatgccgggcctgggcacatctcatgcttgttattgtctctgtttctgtgatacaaacaggcagccctagagctctggagatcccaggcaaatcatccatgaggtaagttgctttcttccaaaatcaatggctttggcttttgttataatctgattaacgtaaatgctcttacaaggtcaaacattcatagttttacagtccagttactcagttctgaaaactgcagttaactaatgacaatgtgtgagaacccctaagatcaggcatcgtgagtcgtgattaaacggattgctgtggtcacaatgtcagccagcagtttcatcacaaagatagaggttgtgataagcattcagacacagaagttaccttggggtcaatttgtattctgtgtagtataattagcctgtgcttattctcagtaaatatctgacaatgttcttattcaaaggattctataaattaaatgtccctccccagaatagattggaaatgcacatttatttgtacttggtattactcatacaacacttaggtgtgtgattaaaggaggaaatgtacagtgagctagcatcccctggttttggcagggtgtgggtgttgactgtggcatggtttgggacccaggctctagcaaaggtcttcatgggcaagtctaagggtcttttggtctgtcctactgccaagccacctgacttcattcatcagtccctagaatgcttcatcaatgcagacaaacatctcagccagccttttatttctatttctacttgttatttttttgagaaggagtcttgctctatcgcccaggctggagtgcagtggcacaatctcagctcattgcatcctccgcctcccgggttcaagtgattctcgtgcctcagcctcccgagtagctgggactacaggcacgtgccactacgcccggctaattttttgtgttttaagtagagacagggtttgaccacgctggtcaggctggtctcaaactcctgacctcaagtggttacaccactccagcctgtgcaacacagcaagactccttctcaaaaaaataaaaaataaaagttttttaaaaatacaaaaaatgaacaaaattagccaggtggggtggtgtgtgcctgtagtcccagctacttgggaggcttcagtgcgaggatctcttgagcccgggaggtcaaggctgcagtgagccgagatcacaccattgcactccaacctggttgacagattgagactctgtctcacaaaaaaaaaaaaaaaaaaaaaaaaaaaattcttaagactttttaattgcaaaaaagagaaagtaagttgtaaatctacaaatatcctagagttcccatttaccaccccccgcctcgcacccagcactctggttgttaacatcatacataaccctggtatatatatcaaaatatgaaatgaacactgatacaatgctgtcaactaaactgcagattttattcagatataaccagcttttccactaatgtcctctttctattccagcattgagtccaggacaccacattgactaaagacataattcttttaaatgttacttaaagatgtacaaatagaaacctagttacaaaatgtattatgcttttaactcttgtattattataaaccaaaccaaaacaaatttatattttcttttttttttgagacagagtctcgctgtgtcacccacgctggagtgcagtggtgtgatcttggctcactgcaacctccatctcccaggttcaagcgattctcctgcctcagcctccggagtagctgggattacaggcatgtgacactatgcccggctaattttttgtaattttttttttttttttttttgtagagacagggtttcaccatattagccaggatggtctcgatctcctgacctcgtgatccgcccacttcggcttcccaaagtgnnnnnnnnnnnnnnnnnnnnnnnnnnnnnnnnnnnnnnnnnnnnnnnnnnnnnnnnnnnnnnnnnnnnnnnnnnnnnnnnnnnnnnnnnnnnnnnnnnnnnnnnnnnnnnnnnnnnnnnnnnnnnnnnnnnnnnnnnnnnnnnnnnnnnnnnnnnnnnnnnnnnnnnnnnnnnnnnnnnnnnnnnnnnnnnnnnnnnnnnnnnnnnnnnnnnnnnnnnnnnnnnnnnnnnnnnnnnnnnnnnnnnnnnnnnnnnnnnnnnnnnnnnnnnnnnnnnnnnnnnnnnnnnnnnnnnnnnnnnnnnnnnnnnnnnnnnnnnnnnnnnnnnnnnnnnnnnnnnnnnnnnnnnnnnnnnnnnnnnnnnnnnnnnnnnnnnnnnnnnnnnnnnnnnnnnnnnnnnnnnnnnnnnnnnnnnnnnnnnnnnnnnnnnnnnnnnnnnnnnnnnnnnnnnnnnnnnnnnnnnnnnnnnnnnnnnnnnnnnnnnnnnnnnnnnnnnnnnnnnnnnnnnnnnnnnnnnnnnnnnnnnnnnnnnnnnnnnnnnnnnnnnnnnnnnnnnnnnnnnnnnnnnnnnnnnnnnnnnnnnnnnnnnnnnnnnnnnnnnnnnnnnnnnnnnnnnnnnnnnnnnnnnnnnnnnnnnnnnnnnnnnnnnnnnnnnnnnnnnnnnnnnnnnnnnnnnnnnnnnnnnnnnnnnnnnnnnnnnnnnnnnnnnnnnnnnnnnnnnnnnnnnnnnnnnnnnnnnnnnnnnnnnnnnnnnnnnnnnnnnnnnnnnnnnnnnnnnnnnnnnnnnnnnnnnnnnnnnnnnnnnnnnnnnnnnnnnnnnnnnnnnnnnnnnnnnnnnnnnnnnnnnnnnnnnnnnnnnnnnnnnnnnnnnnnnnnnnnnnnnnnnnnnnnnnnnnnnnnnnnnnnnnnnnnnnnnnnnnnnnnnnnnnnnnnnnnnnnnnnnnnnnnnnnnnnnnnnnnnnnnnnnnnnnnnnnnnnnnnnnnnnnnnnnnnnnnnnnnnnnnnnnnnnnnnnnnnnnnnnnnnnnnnnnnnnnnnnnnnnnnnnnnnnnnnnnnnnnnnnnnnnnnnnnnnnnnnnnnnnnnnnnnnnnnnnnnnnnnnnnnnnnnnnnnnnnnnnnnnnnnnnnnnnnnnnnnnnnnnnnnnnnnnnnnnnnnnnnnnnnnnnnnnnnnnnnnnnnnnnnnnnnnnnnnnnnnnnnnnnnnnnnnnnnnnnnnnnnnnnnnnnnnnnnnnnnnnnnnnnnnnnnnnnnnnnnnnnnnnnnnnnnnnnnnnnnnnnnnnnnnnnnnnnnnnnnnnnnnnnnnnnnnnnnnnnnnnnnnnnnnnnnnnnnnnnnnnnnnnnnnnnnnnnnnnnnnnnnnnnnnnnnnnnnnnnnnnnnnnnnnnnnnnnnnnnnnnnnnnnnnnnnnnnnnnnnnnnnnnnnnnnnnnnnnnnnnnnnnnnnnnnnnnnnnnnnnnnnnnnnnnnnnnnnnnnnnnnnnnnnnnnnnnnnnnnnnnnnnnnnnnnnnnnnnnnnnnnnnnnnnnnnnnnnnnnnnnnnnnnnnnnnnnnnnnnnnnnnnnnnnnnnnnnnnnnnnnnnnnnnnnnnnnnnnnnnnnnnnnnnnnnnnnnnnnnnnnnnnnnnnnnnnnnnnnnnnnnnnnnnnnnnnnnnnnnnnnnnnnnnnnnnnnnnnnnnnnnnnnnnnnnnnnnnnnnnnnnnnnnnnnnnnnnnnnnnnnnnnnnnnnnnnnnnnnnnnnnnnnnnnnnnnnnnnnnnnnnnnnnnnnnnnnnnnnnnnnnnnnnnnnnnnnnnnnnnnnnnnnnnnnnnnnnnnnnnnnnnnnnnnnnnnnnnnnnnnnnnnnnnnnnnnnnnnnnnnnnnnnnnnnnnnnnnnnnnnnnnnnnnnnnnnnnnnnnnnnnnnnnnnnnnnnnnnnnnnnnnnnnnnnnnnnnnnnnnnnnnnnnnnnnnnnnnnnnnnnnnnnnnnnnnnnnnnnnnnnnnnnnnnnnnnnnnnnnnnnnnnnnnnnnnnnnnnnnnnnnnnnnnnnnnnnnnnnnnnnnnnnnnnnnnnnnnnnnnnnnnnnnnnnnnnnnnnnnnnnnnnnnnnnnnnnnnnnnnnnnnnnnnnnnnnnnnnnnnnnnnnnnnnnnnnnnnnnnnnnnnnnnnnnnnnnnnnnnnnnnnnnnnnnnnnnnnnnnnnnnnnnnnnnnnnnnnnnnnnnnnnnnnnnnnnnnnnnnnnnnnnnnnnnnnnnnnnnnnnnnnnnnnnnnnnnnnnnnnnnnnnnnnnnnnnnnnnnnnnnnnnnnnnnnnnnnnnnnnnnnnnnnnnnnnnnnnnnnnnnnnnnnnnnnnnnnnnnnnnnnnnnnnnnnnnnnnnnnnnnnnnnnnnnnnnnnnnnnnnnnnnnnnnnnnnnnnnnnnnnnnnnnnnnnnnnnnnnnnnnnnnnnnnnnnnnnnnnnnnnnnnnnnnnnnnnnnnnnnnnnnnnnnnnnnnnnnnnnnnnnnnnnnnnnnnnnnnnnnnnnnnnnnnnnnnnnnnnnnnnnnnnnnnnnnnnnnnnnnnnnnnnnnnnnnnnnnnnnnnnnnnnnnnnnnnnnnnnnnnnnnnnnnnnnnnnnnnnnnnnnnnnnnnnnnnnnnnnnnnnnnnnnnnnnnnnnnnnnnnnnnnnnnnnnnnnnnnnnnnnnnnnnnnnnnnnnnnnnnnnnnnnnnnnnnnnnnnnnnnnnnnnnnnnnnnnnnnnnnnnnnnnnnnnnnnnnnnnnnnnnnnnnnnnnnnnnnnnnnnnnnnnnnnnnnnnnnnnnnnnnnnnnnnnnnnnnnnnnnnnnnnnnnnnnnnnnnnnnnnnnnnnnnnnnnnnnnnnnnnnnnnnnnnnnnnnnnnnnnnnnnnnnnnnnnnnnnnnnnnnnnnnnnnnnnnnnnnnnnnnnnnnnnnnnnnnnnnnnnnnnnnnnnnnnnnnnnnnnnnnnnnnnnnnnnnnnnnnnnnnnnnnnnnnnnnnnnnnnnnnnnnnnnnnnnnnnnnnnnnnnnnnnnnnnnnnnnnnnnnnnnnnnnnnnnnnnnnnnnnnnnnnnnnnnnnnnnnnnnnnnnnnnnnnnnnnnnnnnnnnnnnnnnnnnnnnnnnnnnnnnnnnnnnnnnnnnnnnnnnnnnnnnnnnnnnnnnnnnnnnnnnnnnnnnnnnnnnnnnnnnnnnnnnnnnnnnnnnnnnnnnnnnnnnnnnnnnnnnnnnnnnnnnnnnnnnnnnnnnnnnnnnnnnnnnnnnnnnnnnnnnnnnnnnnnnnnnnnnnnnnnnnnnnnnnnnnnnnnnnnnnnnnnnnnnnnnnnnnnnnnnnnnnnnnnnnnnnnnnnnnnnnnnnnnnnnnnnnnnnnnnnnnnnnnnnnnnnnnnnnnnnnnnnnnnnnnnnnnnnnnnnnnnnnnnnnnnnnnnnnnnnnnnnnnnnnnnnnnnnnnnnnnnnnnnnnnnnnnnnnnnnnnnnnnnnnnnnnnnnnnnnnnnnnnnnnnnnnnnnnnnnnnnnnnnnnnnnnnnnnnnnnnnnnnnnnnnnnnnnnnnnnnnnnnnnnnnnnnnnnnnnnnnnnnnnnnnnnnnnnnnnnnnnnnnnnnnnnnnnnnnnnnnnnnnnnnnnnnnnnnnnnnnnnnnnnnnnnnnnnnnnnnnnnnnnnnnnnnnnnnnnnnnnnnnnnnnnnnnnnnnnnnnnnnnnnnnnnnnnnnnnnnnnnnnnnnnnnnnnnnnnnnnnnnnnnnnnnnnnnnnnnnnnnnnnnnnnnnnnnnnnnnnnnnnnnnnnnnnnnnnnnnnnnnnnnnnnnnnnnnnnnnnnnnnnnnnnnnnnnnnnnnnnnnnnnnnnnnnnnnnnnnnnnnnnnnnnnnnnnnnnnnnnnnnnnnnnnnnnnnnnnnnnnnnnnnnnnnnnnnnnnnnnnnnnnnnnnnnnnnnnnnnnnnnnnnnnnnnnnnnnnnnnnnnnnnnnnnnnnnnnnnnnnnnnnnnnnnnnnnnnnnnnnnnnnnnnnnnnnnnnnnnnnnnnnnnnnnnnnnnnnnnnnnnnnnnnnnnnnnnnnnnnnnnnnnnnnnnnnnnnnnnnnnnnnnnnnnnnnnnnnnnnnnnnnnnnnnnnnnnnnnnnnnnnnnnnnnnnnnnnnnnnnnnnnnnnnnnnnnnnnnnnnnnnnnnnnnnnnnnnnnnnnnnnnnnnnnnnnnnnnnnnnnttttgtaggagtgccccataatcagatttgcctgttagagagaatgagtttgtctcttatgggaggcagacttgaggctgggagaacaggaaaagggactacagtgggccaggtaggagacaatgaggtctgaactcctgcggcagcaggaacagagaaggaatctgatattggaaagaaggaaccaaatgcttcggagacctactggccatggaggtaaagaattaggagaggagccaggcgcggtggctcacacctgtaatcccagcacttcggaaggctgaggtgggaggatcacctgaggtcaggagttcgagacccgcctggccaacatggtgaaaccccgtctctactaaaaatacaaaaattagcctaaaaaattagccaggcatggtggcatgcgcctgtgatcccagctactcaggaggctgaggcaggaaaatcgcttgaacccgggaggcagaggttgcagtgagctgagatcccgccactgcactccagcctgggcaacagagtgagacactgtctcagaaaaaaaaaaaaaatttaggagagcaagcttgaatgttatttgaaggtttctggaatggcaactaacagcagaacatttaaggttagttggaatctgtaacaactagtttttctggaatagtttttaatgttttggttttctaataactagcacttatgtagtgttctgtgtaaggcactgttctaagtgctttatatgcactttattttattgactctaaaagaccattacctataagatgcaccattccctcaagatatgcacgatacactagactcatcctttcagagatgctaaaaaaaaatgaatgtcctgaaatcagtgatttatggcgtaaactcacttttctgtttttttgttttttgagacagagtctcgctcttttgccaggctggagtacagtggcgcaaacttggctcactgcaacctccacctcctggctcactgcaacctccacctcctgggttcaagcgattctcctgcctcagccacctcagtaactgggactacaggtgtgtgccaccatgcccagctaatttttgtatttttagtagagatggggtttcaccatgttggccaggatggtctcgatctcttgacctcatgatctgtcctcctcggcttcccaatgtgctggaattataggcatgagccaccatgcccagccttttttttttttttgagacggagtttcactcttgttgcccaggctggagtgcaatggcacaatcttggctcactgcaacctccgcctcccgggtttaagcgattcctgtgcctcagcctccagattagctggaactacaggtgccaaccaccacacctggctaatttttgtatttttagtacaaacagggttttgctgtgttggccaggctggtctagaactcctggcctcaagtgatctgcccgcctcagcctcccaaagtgctgggattacaggtatgagctactgcgcctggtcatgattagtttttttttgtttgtttgtttttgtttttgagacggagtctcggtctattgcccaggctggagtgcagtggcgccatctctgctcaccacaacctctgcctcccgggttcaagcaattctcctgcctcagcctcctgagtagctgggactacaggtgcgtgccaccatgcccggctaatttttgcatttttagtagagacaggggtttcactatgttcaccaggctggtcttgaactcccgacctcgtgatctgcctgccttggcctcccaaagtgctgggattacaggcgtgagccaccgtgctcagcccatgattaggtcttaagggcagagctctcatgaatgggattggtgcccttacaaaatacaggttgagtatccctaatctgaaaatccaaaatctaaaatgctccaaaatctgaaactttctgagtgtcaatgtgatgctcaaaaggaaatgctcactggagcatttcggacttgaaatgtttggattagggatgcttaactggtagacccatctctataaaaacaaaacagccagctctggtggtgtgcctgtactcccagctactcaggaggataaggtggaaggacagcttgagctcgagtttgaggctgcagtgggtcatgatcatgccactgtattccaacctggacaacaaagtgagatgcccccatggaaaaaacccacaaccccaacagaaagtagattagtggttgtctagggcttgggtgggggatggggcatggagtgaatgctaattgaggctggggtttctttttgttctaaaaatgattgtggtgatggttgcagaactctgaatacactagaagtcattacattgtacattcaatggggacattttacagtatgttaattatatctcaataaaactgttaaaaaggaaatgttaatggaatttggatacatttccacttatttggtatatggctttattttcagttttattttacaaacacttacatggtcttactatgtgccaagtactgggttccaaacgttttataaatatgaatgtatttcatcctcataactctgtgaagtggatactactgttatctccattttacacaggtacagagaggttaggtaacttacctaaggtctttcagttaaaaatggcagtcgggatttgaatcttgccagtctggcttcagagtctgtgatctttatttatttttcaagagatagggtcttgctgtgttgcccaagctggagtacagtgttagtcacaggcatgatcccattactggtgagcatgggagttttgacttgctccatttctgacctgagccgcttcacacctccttaggtaacatggtggtccctggctcttgtggggtcaccatattgatgccaaactgaggacacccaacgctcgttgcgtgctacagccaagaactcctgggctcaagtgattctcctgcttcggcttcactagtagctaggacaataggcctgcaccaccaagccaagccagagtctgtgatctaaccattctattatgccacctttcccaaagatgtttacagtttttcttaactgtaaccagtgtagaaaattaaaaatttgtggaggatcttaaatttgaggacagagttaaggaatatatccctacgtacatggctaaatgtaaatatgtagcaatgcctaatagaggccaggcactgttctggtactctgggtaggggtggatggggtggatagggaatataaggacaaatgatatagggtccacgaagaactctcaacctaattctgatgcaatgtggtgttggtatttgagagtttccaaaatgttgtgggtaggagagcaaaacaataatatttgggttttagaaagtaaggcataaaataatttgttcattaaatcaaaggaagtaagaagatcacttgggaaagttataatccaaaaatagttaagtatttgagtttcagcaggaggaatgaaaacagattactttaaggaaatatttcataattagaaatatccaggtttagatactgaaagtgagggccagagataggaatgggttgaagatgacgccacagtcttcttttttttttttttttttttttgagacggagtctcactctgttgcccaggctggactgcagtggcacgatctcagctgacggcaacctctgcctcccgggttcaggcgattcccccacctcagccttcagagtagctgagattacaggcgcgcgccaccaggcccgactgatttttgtatttttagtagagacggggtttcaccatcttggctaggctggtcttgaactcctgacctcaggtgatccgcccgcctcggcctcccaaagtgttaggattacaggcgtgagccaccgcacccggcctacagtacttctaacgtaacatcgcagaaacactggaggagagaagagaatacacttccactcggaattcgcaccctggtcgccttcattcgctgggttcactcgctgaactgcctcgcccccgcccgggaggatgacatctcggcctgggcagagactcgaaagcctcctcctgccgctcgggatgctaacagcagggagagctgtgtctagtttttttttttttttttttttttttgagagggaatctcgctctgtcccccaggctggagtgcagcggcgcgatctcagctcactgcaacctccgcctcccaggttcaagcaattctcctgcctcaacctcccgtgtagctgggactacagatgccggccaccacgcaaggctaatttttttgtatttttagtagagacggggtttcaccatattggtcaggctggtctcgaactcccgacctcaggtgatccgcccgcctcagcctcccaaagtgctgggattacaggcgtgagccaccgcgcccggcttgtgtctagtcttgcccgtagcagcgtcgccgacagccacgccgggttgtcagagcctcactagtttttctcccggccgccgctcttcccggattcagccaccttccctcttccgggaacttgcccgcgtgttccggctccaggaagtgcgtcatcagtcggcgccagcggccgcacgccgcggagcaggggctcggaggtcccgggattacggtgctcgagcacgctggtgggaaaggacccgggacttgaacagtgttgtgcggcgccatgcaggtctccagcctcaatgaggtgaagatttacagcctcagctgcggcaagtcccttcctgaggtgagtcacttcccggccccctcactctcgagctcttgggggtcgtcctcctcgtggggcagccgcccctctcctcggccctagcctctgttttagctggacgctggtcaccccccgactcggggaggcccagaggcggctgacaatttccgggggaggtgtcggcattgggagacaaggacactgccgtcaccgcgccagaaactggaccaagggataatcagggtcagtgagctttgctggaacttttgtaaagttctctgttccagagaacgcaaccatttgggcctctttgggtgttcacagtccctgccgtacatcgaggaggaaaacgtggcagattcgttgacacatctctcccccatatggccatcagctgtttgtggagtccctatcatttgccaggtcttagggatacaacagtgaacaagggagatacagacttcgcatctgcagaatttatggtgtagaggacagtattttcgagacttgttgaacttaacctgattcctagtcttaaagttggagagggcttggacaagtcggtaattctcttccaatcttctcgtgtttagtaatgcagctgagatttaataatgcgtttaatatgcagctgagatccagcaaggggaagggtgacttgtccagcatgacacacttaggctctgaaacttgtcttttgtttcttatacgtgatgatccagcctctgtccaagcactaccactgagcactaccttttgtggaagctcatttccattttgagactctgcacttgttagaaagtggttttcaaatatgtcaccttatagcatgccactgttggcctgagtcctgcccttggaaaacagaataaatatagctctccttccatgcgtctgcttctacaaaaatttggagccagtgcttaggtttttcctttcttcctaaaattctggtttgaataattccctgtcttccagttgttcttcacaccccatgagctttctcattttgttcattcattctccacatgtattgagaagttactgtgtgcaagcaactctgttttaagtattgggatctatagtggacatttcagataaggttccctgttggggaaaagggaaataaacaagtgagcaaataaggcaatttaaggtagtcaaaaagtacttttcgtgatgaatgattagaagagagctgttttggataaaatattgagagaaagtgttttggataaaaccttcggggaaggcctctctacaagaggtgacatatgagcagaaacttggatgatgaagaggagccagtcgtgtgaagatgtggggaagagttttcagtgctgagaacagaaagtgcaaaagccccacatgggaatgcactggacatgtaggaggacggaagaggcacaggtgtgattgcactatgctgagtgagggggcgagagcagggtggatgaggctggagaggtaggcctggtaggaaaggtaggaagttcaagttttattcttagtgctgctggaagtcactgttgtgtgggctgctgtgcgacaaatgtctagctggggagggttcaagtcgggatgaattaggtagtccaggtgagcgacttcggtggcttgggcttgcctggtaacaaagaagatgctaaaacacagtgagattcaggacatactttgtagatagggtaatggaacttgctaatggattggactgttggtagagggaagttgaggtgacaaaaaggaaggaatcagagaactcttcagttttgagtctgaacaagtgggtgcacggtggtgctgctaactgacatggagaagaatcaagaaggaacacattgaaaggtggagaggaggaacgtagtgagcaaaaagaatcaagatttttttttgaggtcgcgtgcaatggcctgatgttggctcactgcaacctctcgggttcaagcgattctcctgcctcagcctccccagtagctgggactacaggcacgtgccaccacaccagctaatttttgtatttttagtagagacggagtttcactatgttggccggtatggtctcgatctgatcttgtgatccacccacctcggcctcccaaagtgctgggattacaggcatgagccactgcacccggcccaaggtttttattttcaatagtgaacatttgaagttctaatacataccaaatggagatgttgagtagttagcagttgcatggatactaggatggagattgcaggtgaatttactgtcgttatttgggactaggtgagatcaaattgtgagagaaagaacagagaagataactaggctgaggacctgaggcagtcttagcatttgtcatccaagaagaggaggggaacccagcaaagaagaaagagtagtgggcactgatggaaggggagactgggaaatgtgtagttttgtagaagtaagtgtttcaaggaggaggtggtggtcacctgtgtcagctgctactgagagcttcagtaagatgaaggcagaaaaacgaccatcgactttggcatgatgcagagcgcccttgaccttggcaaggagctccagtggagtggtggggagggtagcttgagctgagtggatttggaaacccctgcttgtcctgtttaatattttctggttatttctttgaggtgtggtgcctaaactacacgtggaaccccagttgttgtctgatctgtgcaaatattgcttctctccttctgggctttacctttttattaatgtagagaagcctctacgtttactcccctggtgatcctaggcagtctcctggctttaagcacatctgcatatcgataactatcacattgatgtttctagcccttacctctactctgaactggacttgtgtatccaactgtttcttgacatccccgcttggatgtctgataggcatctcaaacttaacttgtccaaagtagaacaccagctttccccccacatttccccctcctgcaacctagtggtcttccctccctcagccagtggcaactccatcccgcaagctgttgatgccaaaaacactggaggctttttgttgttgtttctttgctctcatacaatccactagaaaatgctgttgcttctatcttcagtatagatccagaatccagtcacctccattactgtcactgattcaagacactgtcacccctgactatgcaattgcagttattgcagttgacttctaagcagtttctcagtttccaccctctacccctttattccacagtctgttatcagtaagctgccagggtgatcctctactcagaactgtccagtggctcctgctctcttgggggtgaaaagcagagtcctttgagtgacttttaaggtcctacttgatgttgtgccttcctgccctcctctctgagctcagcggtcactgttctccaccttacactggcctcacaagtctcactgctcgagaccaggcacactcctgccgtaggaccttggcacaggtcctgcctgcctgcttttttcccagatgttctccaggctttgcctcctcatgcctttcaggtcgttgctcaagaggaccttaaccttattcaaaattataattctccaccaacacttcgtctccttttcttgctttattttttccatggcatacataaccatctgacattctaattgttttacttccttatttgttggtgttccctcacttgaaagaaagcttcatgaaaggaggggtttttagatttttaaattttttttttttttgaaacaggtttactctgttgcccaggctggagtgcagtggcacaatcatggctcacctcagccttgacttctctgggctcaatgattcttgcacctcagcctactgagtagctgggactacaggtgtgtaccaacatgcccagctgcttttttttttttgtagagacagtgatcccactttattgccaggctggtctcgaactcctgggctcaagtgatccccttgcctcagtgctgggattatagatatgaaccactgcacttggccaagagggcttttttttccctcctgttttatttactactgctatacctaattactggcatttagtagtactaaataaatatttgtttaatgtattgatgaataaagttaattttcattttcagctccatcacacttttgacttggggctacgatttttattcacacaatttgacctacagtctcccattctggagttaatcagcttttgttgtatttttaatgccgttaaatttattttcgttagttttctagtggttaagcctgtttttttttttttttttggcgggggggggggggggggggacggagtctctctcagtcaccaggccggagtgtagtgggaagatctcagctccctgcaacctccgcctcccgggttcaagtgattccccttcctcagcctcccgagtagctgggattacaggtgcccaccaccacacctagctaattttttgtattttggtagagacggggtttcaccatgttggccaggctggtctcaatcggcctcccaaaatgctgggattataggcgtgagccaccatgcctggccaagtatcagctatttggtcagttatttatctggttttattccttgtaaaaaatatatttctataagaaacattctcctataaatgttttactttttaaattctcacttaaatagattaaattgttccatatatttagttataacccataatatttgaggctttctgctttcctttagattgcttagatgggttagtttttctctatgtaaaagattgtagttcaaaaaatttcttatctggccgggcctggtggcccatgtcagtagacctagcattttggaaggcaaaggtgagaggattgtttgagcccaggagtttgagccttcggtgagctacagtcacatcgcatcattgtactatagactgggcaagcatgagaccctgtctctaaaaaagtaaaaataaaagaaattatctaatgtatgtaagtatacacaagaaaaaaaatccaggagatatttaatacgttacgagtagagttaggattagagaatattttttgcttcctatgttatatattcctatgaagtttgaatttttaaatataagcatgtattgattttgcaagccgaaaaacaatttagctaaatttgttttaaaataaactctcttcattttctttaagtggctttctgataggaagaagagagcgctacagaagaaagatgtaggtgagtattgttttttcccacttcagctgcgttagtgatccatgttctaatgcttttactcatttgctgttatatataagtgaggatttataagaatgcggtaacatgtagtggaaaatgaatgctcttgtcccttttcttttttttcctttgacatggggtctcactgtgttgcccagactggtctctaactcctgggcttgagcagacctcccaccttggcctcccaaagttttgggattacaggcatgagccactgtacgcagctcttctcctttttttttttttttgagatggagtttcactcttattgcccaggctggagtgcaatggtgtgacctcggctcactgcaacctccacctcctggattcaagcagttctcctgcctcagcctcctgagtagctgggattacaagccaccacgcccggctaattttttttgtatttttagtagagatggggtttctccatgttggtcaggctggtctcgaacttgcgacctcaggtgatccacctgccttggcctcccaaagtgctgggattacaggtgtgagccaccgcgtccggccgcctttctccttcttaagaaactttttgttgtggttggtatgttcctggtgggtatgggatttgattttaccttattaactaataagttagcctgttaccgtttcatggataacaatagtagacgcaagactcctgggctagaaatgcagatgttattactcacagcacagtagatagcatgaacatcagcatatttgtgccagttcccctcttgggtctcctggggacacttagcacagtccaggtggatgcttggcacacagtggatttgcgttgtggccgagcaacacagcttgggaagtccactgcttttctggcaagcagtaagcaaacctgtgttttgtccagaagggacaggttacctgtctatcaaggttctcagcagtgtaaacaaccctgagaaatggctcaggtaagagtggctggggtcttgcaatctcgccatacccagtaagcatgcaggtccaaggaggactgtctctcctaacaggtccctaattgctttgctctcttgtgtatcaaaatcttatcgtgtaaattaaatccatttatcagtgtttgagatacagagacaatgagcatttcttgaagaaaggaattttacatgtagggtttatgaatctgaacaattaaaggtgattgcagaagatgttggttcttttaaatttacggcagcaagaaattgtaagaaaaatttctaacttaaataattttggtgcacaagttttcattatattttcttcattatagcttgtcacatatgaaagaaaatttattttcccatatattttgtttaacttactctttaaaaacctaaggtatcaaaggggtttcctcttgtctgcagataattggttccaaaagaggtataagtcagcttcgtagcagtttcttatataaacttaagaggttgggtcaggcacagtggcttatgcctgtaatcccagcactttggaaggcccaggcgggcagatcatgaggtcaggagttcaagaccagcctggccaacgtagtgaaaccccgtctctactaaaaatacaaaaattagccaggcatggtggtgcgtgcctgtagccccagctacttgggaagctgaggcaggagaattgcttgaacctgggaggtggaggttgctgtgagccaggattgtgccactgcactccagcttggacaacaggtgagacttgtctcaaaaaaaaagagtttggagagtttgggggcttaaacctgttacttaggagaaaaaaaagttggatttttgtctttgccatgattgagtagtaatagtggtttaggggcccagtgcggtggctcactcctgcaatcccagaagtttgggaggctgaagtgtgaggattgcttggccctagaagtttgagaccagcctgggcaacgtggcgaaaccccatctctacaaaaaatacaaaaatacctgggtgcagtggcatgcgcctgtagtcctagctatttgggggggctgaggtgtgaggatcgcttcagcccgggaggttgaggctgcagtgagccatgattgtgccactgcactccagtctgggtgacagagtgagaccctgtctcaaaaaaaaaaaaaaaaaagtggtttaatgtttatgctcttcctcctgtaacactggatgtttgatacactgttgtggaaaattttttttcaattaatgatgctactttttttattcttgaaaagtaaaaatgaaatacttagcttagaaaaacaacgtatgagctaaggaaaaaacctctgctgtttaatggttgggctgtgctggtgacctttcccaaggccaggaagcatttgggatgaatttcacctgtttatagttgtggtgactgcttggtacccatttgtcttcttatgatagagaataagcacatgttagttaaactagttgtttttttctctctttttagatgtccgtaggagaattgaacttattcaggactttgaaatgcctactgtgtgtaccactattaaggtgtcaaaagatggacagtacattttagcaactggtaagcatctttttggttatgattttcatgcattttgtaccaggaaatgctgcgatgggaaaggtctttttttttttaaccctaatattttattataaaaaatttcaaacacacagaaatattgaaaaaattgtatagtaaacacccatttaactactacctaaattctgcaataaatagtttactctgcagtatttgatttatcccatgcatctgtctctttgttcatgtatcagtccatcttgtttctttgatgcatttcagtgtaagttgaagataccagtatacttcaccctgaaacacttcagcaagtatatcattagctggagttcaatatttatcagtatttacttatagcctttttcaaggtaaaaacatttatattggtgaaatgcacagatcctaagtttaccatttggttagttttgacaaatgcacacgcttgtgtaactcaaagctctatcaagatacagaacatttttttcctgcagaaaatttctcccacccatgcagagacaaccattgctgattttttttcaatatagacaagtttagcctgtttcagaacttaatataaatgtagtcatacactgtatattctttctctgtgagacttatttcatgtaggattttgtatttgaggttcatacatgttgttatatgtgtcaatagcttcttttttttttttattaccaaaagatatttcattctatgactaagccacagtttatttacccattctccatgtgatgaacagctaggctgttttcattcaggtttttggctgttactaataaagcactatgaacaatcgtatagaagtctgttttgtgggtataagctttcatgtctttggtgaatacctaggagtggaatttttgagtcctaggtaggtgtatgtttagtgttctgggaaacttctaagtcgttccccaaagtgatcatatcatttgcactcctactaacaatgaatgagagttttaggaaaggtcacttataacatgattttctgtataatgtactaatttttaaaaatatctctaagattttacattaacagtatttatcgttatcaaaaaatcatgaaatgtagaaaacttttagtgtgttggagtgttgaacagtatcacccaacctttagtggttgtgattttggcgcgtaagtcctgtatattgtccaaacattttttgctgataacagtattccttttccaaccactttctttttggtaataccttttatacatacacaggccagtctcttttgctttgtgttaatgattatctcagtactaactaacactatctacatctcttagccttcagttttatgttcagaaactggtaaaaagaattgaggaaatctaagatacatggacacccttactgaagactagaagaaactcaaattttcttcattttatagatccagagatattaagtgacttgtctaggctcacagatctagtacttaagaaagctaggatatagatttgttaaatgacactttcttttatgaaatcgtcctctattcccatgcaaaattaatggttccttttctccttctcctccctctccctctccctcttctccctctccctcttctccctctccctcttctccctctccctcttctccctctccctcttctccctcttctccctcttctccttcttctccttcttctccttcttttttaagagtctcactctgtcacccagtctggagtgcagtggcatgattttggctgactgcaacctccgccttccgggttcaagcgattctcctgtgtcagtctcctgagtagctgggactacaggtgctcgccaccacacccggctaatgtctgtatttttttagtagagacagggtttcaccatgttggccaggctggtctcgaactccttgcctcaagtgatccgcccaactcgcccttccaaagtgctgggattataggtgnnnnnnnnnnnnnnnnnnnnnnnnnnnnnnnnnnnnnnnnnnnnnnnnnnnnnnnnnnnnnnnnnnnnnnnnnnnnnnnnnnnnnnnnnnnnnnnnnnnnnnnnnnnnnnnnnnnnnnnnnnnnnnnnnnnnnnnnnnnnnnnnnnnnnnnnnnnnnnnnnnnnnnnnnnnnnnnnnnnnnnnnnnnnnnnnnnnnnnnnnnnnnnnnnnnnnnnnnnnnnnnnnnnnnnnnnnnnnnnnnnnnnnnnnnnnnnnnnnnnnnnnnnnnnnnnnnnnnnnnnnnnnnnnnnnnnnnnnnnnnnnnnnnnnnnnnnnnnnnnnnnnnnnnnnnnnnnnnnnnnnnnnnnnnnnnnnnnnnnnnnnnnnnnnnnnnnnnnnnnnnnnnnnnnnnnnnnnnnnnnnnnnnnnnnnnnnnnnnnnnnnnnnnnnnnnnnnnnnnnnnnnnnnnnnnnnnnnnnnnnnnnnnnnnnnnnnnnnnnnnnnnnnnnnnnnnnnnnnnnnnnnnnnnnnnnnnnnnnnnnnnnnnnnnnnnnnnnnnnnnnnnnnnnnnnnnnnnnnnnnnnnnnnnnnnnnnnnnnnnnnnnnnnnnnnnnnnnnnnnnnnnnnnnnnnnnnnnnnnnnnnnnnnnnnnnnnnnnnnnnnnnnnnnnnnnnnnnnnnnnnnnnnnnnnnnnnnnnnnnnnnnnnnnnnnnnnnnnnnnnnnnnnnnnnnnnnnnnnnnnnnnnnnnnnnnnnnnnnnnnnnnnnnnnnnnnnnnnnnnnnnnnnnnnnnnnnnnnnnnnnnnnnnnnnnnnnnnnnnnnnnnnnnnnnnnnnnnnnnnnnnnnnnnnnnnnnnnnnnnnnnnnnnnnnnnnnnnnnnnnnnnnnnnnnnnnnnnnnnnnnnnnnnnnnnnnnnnnnnnnnnnnnnnnnnnnnnnnnnnnnnnnnnnnnnnnnnnnnnnnnnnnnnnnnnnnnnnnnnnnnnnnnnnnnnnnnnnnnnnnnnnnnnnnnnnnnnnnnnnnnnnnnnnnnnnnnnnnnnnnnnnnnnnnnnnnnnnnnnnnnnnnnnnnnnnnnnnnnnnnnnnnnnnnnnnnnnnnnnnnnnnnnnnnnnnnnnnnnnnnnnnnnnnnnnnnnnnnnnnnnnnnnnnnnnnnnnnnnnnnnnnnnnnnnnnnnnnnnnnnnnnnnnnnnnnnnnnnnnnnnnnnnnnnnnnnnnnnnnnnnnnnnnnnnnnnnnnnnnnnnnnnnnnnnnnnnnnnnnnnnnnnnnnnnnnnnnnnnnnnnnnnnnnnnnnnnnnnnnnnnnnnnnnnnnnnnnnnnnnnnnnnnnnnnnnnnnnnnnnnnnnnnnnnnnnnnnnnnnnnnnnnnnnnnnnnnnnnnnnnnnnnnnnnnnnnnnnnnnnnnnnnnnnnnnnnnnnnnnnnnnnnnnnnnnnnnnnnnnnnnnnnnnnnnnnnnnnnnnnnnnnnnnnnnnnnnnnnnnnnnnnnnnnnnnnnnnnnnnnnnnnnnnnnnnnnnnnnnnnnnnnnnnnnnnnnnnnnnnnnnnnnnnnnnnnnnnnnnnnnnnnnnnnnnnnnnnnnnnnnnnnnnnnnnnnnnnnnnnnnnnnnnnnnnnnnnnnnnnnnnnnnnnnnnnnnnnnnnnnnnnnnnnnnnnnnnnnnnnnnnnnnnnnnnnnnnnnnnnnnnnnnnnnnnnnnnnnnnnnnnnnnnnnnnnnnnnnnnnnnnnnnnnnnnnnnnnnnnnnnnnnnnnnnnnnnnnnnnnnnnnnnnnnnnnnnnnnnnnnnnnnnnnnnnnnnnnnnnnnnnnnnnnnnnnnnnnnnnnnnnnnnnnnnnnnnnnnnnnnnnnnnnnnnnnnnnnnnnnnnnnnnnnnnnnnnnnnnnnnnnnnnnnnnnnnnnnnnnnnnnnnnnnnnnnnnnnnnnnnnnnnnnnnnnnnnnnnnnnnnnattgcaccactgcgctccaacctgggcaacagcgaggaccctgtctctaaaaaaaattaaagccccaaaaacaaacgacagtggaataaaggtcctggctatattaaaagttttatgtatagcctttcaaattatgtgtgtgtgcacataaaattatgtgtgtatatatatgtatctgtctatatggatatatatgtacacacacatatatacacacgcatatatatgtgtatatacacacacacacacacacacacacacacacaaatgtattaaaattattgccatacgacagtgggctcatatttactggttttaaacttctcttttttaagctgggtgcggtggctcacgcctgtaattccagcactttgggaggctgaggtgggtggatcacttgagcccaggagtttgagaccagcctgggcaacgtggtgaaaccccatctttacaaaaaatacaaaaattacacagtcgtgatggcaggcgcctcttggtccccactacttgggaagctgaggtgggaggatcactggagcccagggcggttgaggttgcattgagctgtgattgcacctctgtgctccagcctggttgacagagtgagaccccatttcaaaaaaggaaaaaaaaaaaaaacaccaaagaaaaccccacaaaataaccttttttttttctttaaacgaaatcttgggttttgatctatgccagaaaacaaaggactacctcattcttttatttttaagatgtctttgttggaaatacataacataaaatatgaaagtctccgaaattgcacttcacggagatagactatcattgtgaagttagttcctccaacttttgccttacaaagtgccaaagttaggccaggcatggtggctaactcctgtaatcccagcacttaggcaggcggagacaggcagatcacctgaactcaggagttcaagaccagcctggccaacatggtgaaaccccatctctactaaaaatacaaaaattagccagatgtggcggcaggcacctgtaatcccagctacttgggaggctgaggcaggagaatcacttgaatccaggcagcagaggttgcagtgagctgagattactcctctgcactccagcctgggcgacagagcaagaccccatttcaaagaaaaaaaaaaaaagaggccggcctcgatggctcatgtctgtaatcccagcactttgggaggccaaggtgggtggatcacctgaggtcaggagttcgagaccagcctgaccaacatggtgataccccgtctctactaaaaatacaaaaattagctgggcatcatggcctgcacctgtaatcccagctactcagggggctgaggcaggagaatagcttgaacctgggaggcggaggttgcagtgagccgagatcacgccattgcaccccagtctaaatgacagaatgagactctgtctcaaaaaaaaaaaaaaaaagacaaagtgccaaagttaccatttcattgtacaaaattgggatcgtattatatggatcattctccagcactcacctgtgctccccctgtacttttactttatagtacgttttggcagctttccatgtcaatggttactactgaggtctgcctcatccactttatgggctatgtaatattcccttgtgtggatttattgtcatttattcaactattttcctgtcagtggacattttattgctttcagttgctgaccatttataaataatgctgcagtgaacattcttaatatctttggcaggcttgtggatatatttctgtgagttcaatttatgtaagttgaaatatagattgaaagtatggaaacatcgtgtgtttttagggattgtccttcaaagaagttgtatcaattgtatactaatcaacaacagtataggggaatattttatactttcaccaacacagatattaaccgttttttaatctttgccattctggtggacaaaactgtttcattgtttgcatgtattttgttagattacttgtaggtttcttagttattttgtttggttttctatgacttgcttgtttagcttttgctcagtttttccttggggtgtttgagaggggctgcttttacattcctttcttttgatttggttacaattaatcctgcctgtctctgaacaagaagtacactcaatgtatctggatgttttgactatgaaagtatgtctttaggttttacatcacattaattttttgtaggaacatataaacctcgggttcgatgttatgacacctatcaattatccttgaagtttgaaaggtgtttagattcagaaggtgagtaaaaagctaaatttgaattcatgaaaatggctttttatgttgtctgcttttctggttttaaaatgagaatggtttgtaattagttttttattgctgtataacaaattactgtactacaatcccgatggcttaaaacatccatttagtagctcacagttgtgtagatcttaagtctatgcaggttctgtgctcagacaggaggtcagggtgttgaccaggtggagctctgacttggaggtgctgggcaagaatatgcttccacgtgttagtttgtagttcttttagaattgactggcagcttttcttgttttcagagaatgcaccccccccaaacccccaaaataataaaaaataaaaaagaatttgcttccaaatacactcaggttgttgtcagaattcagtttgttgtggttataggattgtggttcccatttccttctggctgtcagctgggggccactctaggcttctagaggctgcatgcatttctcatcacacactcacctccaccttcaagccagcaacagctcatcagatcctccctgtatttcttttctttcttttatttatttatttattacttttttaaagagatagggtcttgttgcccaggctggagtgctgtggcatgatcatagtttactgtagccttgaactcctgggctcaagtgatcctcctaccttagcctcccaagtagctagaactacagatgtgaaccaccatgccccactaattttataattttttgtagagatggagtctagccatgttgcccaggctggtctcaagctcctggcctcagccgtccttttgctttggtctcccacagtactggaattccaggcatgagccactgcacccagccccttgtgttttggatctctctgactttttcttctgctgccagccagagaaactctgcttttatttatttacttatttattttttggagacggagtcttgctctgtcgcccaggctgaagtgcagaggcacaatcttggctcactgtaaactccacctcccagattgaagtgattctcctgcctcagcctcctaagtggctgggattacaggcgcactttaccacacccagctaattttggtatttttagtagagatgggtttcaccatgttggtcaggctggtctcgaactcctgacctcgtgatccacccgcctcgacctcccaaagtgctgggattacaggcatgagccactgcgcccagctgaaactctgcttttaaagggctcatatgattataaatctcccctttgccatagaatgtaatgtaatcatgggagcaatgtcttatcaattcacagtttctacccacactctcaagggaagggggttatacgagggtaaaggtcactgggggtcattcttagaattttgaatggcactgaagtcaagttaaaatgggaaagttcaagtgcttttatcagttggcctagaatttgggattgaggggaaaggagttaatgggatatgtggtctgtggaattatatgcatagtctcccaacttgtttcaccctttgttgtttttttttttatttttactttttagaaacaggatctttttctgtcacccaggctggagtgcagtgttatgatcacagctcactgcagcctcaactacccaggctcaagagatcctcctacctccgcctcccaaatagctgggatcacaggcatgcaccaccatgtctggctaattttttttctgtttttttttttctttcccatagtgatagggtcttactatatctttgtttattgaaaacaatagaaactctgtgtgccactaataatggctatttttcgctctttttctttatcaggtagactatgaatgggtaaaaaatgacatcttttttgttaagcaacaatttttttgttctttaatgtatatttgaaagtctttaaaattattttgttttcaacatctcagagtgtcagaatttagaagtcattatattttgtgaatttgcattcagttctacaagaaatctagttgatgtgtattgagaaattatgaggcttttaagtttttgttggtgttttgggacaatatactatgacaattttcttcttgtttcacgtagaggcagaaaaaaactggtatgtgtataatttctgtgttgaattagaatctttgcatcaggtttgcgttgttactaagaatattgtttgataattgtatttttcctatttcttgtttttcagttgtcacctttgaaattttgtctgatgactactcaaaggtatgttttatagcattggtttgtactgactagacccaagaaatgagtgagtggaatttattttaatgataagcagttttataatatttttattgttaaactaaaatggctgtgtagttctattgttaaacaaaaatggctgtgtagtaaaatgtaacccatcattttttattaatattaatacagtgatacggatagcctttggccaatctaatatcaaaggtaatttttcatatcgtatatgaaaccttatttgtatttttaagaattggcagcagtcatcttttatatcatcctgtattctagatttgtgattctgattattacgtttaacctagatttatttgccaggttgctttcattttcttatttatatgtgaaatgtaaactagcagggttgtgtgtttaatttttttttaactttgcaaatggttgtggtatattctgaaacagttcaaaatatagctaagtagatttatttctcttttttggtgccattagtccatctttcaactctttttttttggagacagggccttgctctgtcacccaggccggaggggcagtggcgtaatttcagctcattgcagcatcagcctcccgagttcaagtgattctcctgcctctgcctcctgagtagctggaactacaggcatgtgcttccacacctggctaatttttgtgtttttagtggagatatggttttaccaggttggccaggctggtctcaaactcttgacctcaagtgatccacctgacttggcctcccaaagtgttgggattacaggcgtgagcaactgcccccgacccatctttcaactcttataatcactttcaacaattataaaattgtcagtaaactcttgaatttaaaatgaaacatttttagtgatgtcaaatggcatcttgaaagaaaattgaattttcttagctgacatggctttatattttcagttttggaaactatggggtacagcttatccttttgtctatggtatcatttatcatacgttttggaacatgtcattttagaatgtattttctctaaatactgacaaatttgcctttaaataccatctgttgatgtttaagatacccctttagtacactaaagtcaaatgtatacaaggagtttatcataacttgtgtgataatggtgggattattattattttttgttttttattttttgagacaagagtttcactcttgttgcccaggctggagttcaacggcacaatctcggctcactgcatcctccggctcctgggttcaagcgattttcctgcctcagcctcctgagtagctgggattacaggcatgcgccaccatgcccagctaattttgtgtttttagtagagatggggtttctccatgttggtcaggctggtctcaagctccctacctcaggtgacccacccgccttgtcctcccaaagtgctgggattacaggtgtgagccaccatgcccggccaggattatttaaatgtgttcccaagtgaaagagggaactgatcattgagggtaccatgagagtgctctatgttatgacatgctggtgccatgtaaatgaagggcgtttgtttcaagtctttaattagtatgtaaggtttgcagaaaagctatcaggatacaggaaggcattaaggagccgatggagtgttttcattcttaatcccagtggagtgtgtgtgcatggacatgtgtgtttagatacagaaagtgagagagaggtaagggttttccttggtttgccagttttttagcgataatgaagtaaacacctaactagaaacctaagcaaactaatttttttgttttattttcagattgtcttcttacataatgatagatacattgaatttcattcgcaatcaggtttttactacaaaaccagaataccaaagtttgggagagatttctcttaccactatccatcctgtgacttgtactttgttggtgcaaggtattggatccagtccctttttctccttttcacctcctaaaacaaccaacttctgttcctaaatttcgtgtacattttctctgtttaggtaacttgctttaataaaaaagtgatacgtggctcttgtaaaaaaaaaaaaaaaaagaaaagaaaacacaggataggcaaaaaattctattttctacatattggtttacttataagtaccatatactgttttaacaactgttgttttgcttaatacaatattttctaatgttaaaaatatctgtgatagttatgtgcctcattgggaaatactgatgggaagtgtgtgagccttttcagtttagcccggttgccacaatttatgagacatagtattgttttatttatctgtttatcttctagacttttgtctcgaccttaagtttgcttcatgtcagtaatcagtttctatctgatcactttgtgattaataggtcatatgtggttatggactctagtttaaaaaaattgggagagggttttattgttattatttttggtaatttgatagtttgatttaatttgatttgcatgaaatgacaaaagcatttaaagcatctttcattatgtagttgatgtcctacattaaacagtctactaaattctgaacaaaagtttattagcaagttttcaaaaatttaaaaaacagttgtttcaaaaccattaagtagtaaatgtatttaagaaactaattaggacagatgtcataactttagaacaccactacctacccatgtctttttgttttgttttttctgttttttttgtttgtttgtttcattttctttttttgagagggagtctcacactgtcacccaggctgcagtgcagtggtacgatcttggctcactgcaacctctgcctcccaggttcaagtgattctccagccccagcctcctgagtagctgagactatgggcgcctgccaccatgcccagctaatttttgtatttttagtagaggcgatgtttcaccttgttggccaggctggtctcgaactcctgacctcaggtgatccacccacctcggcctcccaaagtgctgggagtacagacatgagccacggtgcccggccctgttttgttttgtttttaacaaagcaattagtgtatctttttggctattagtattagcaatttatttacaatatttaacgagataaattgtaggcaaaaattcagtacaatttcaatagaaatatcccttttttttcccctgaaaatacagcagtatttgaaggactaatttctttaaagaagaataagacatgatctttgcttttaagttgctgaaagtgaaggtataattcctacatgtgactcatttaggagtgatatctttggcttctgttagtatggtgctaaatttggagatagacatgtataatctagttgataaagtcagtttcttagccctattgcacagtatttcaaaactttttattctaagtacctttttggttttattattagttttttataaagatggggtctcactatgtttcccaggctggtcttgaattcctgggctcaaaagatcctcttgctttggcctcacaaaatgttgggattacaggtgtgagctactgtacctggcctttattattattattatcattattattattattattatttgagatggagtctcgctctgtcgccaggctggagtgcagtggtgcaatctccactcactgtaacctccacctcccaggttcaagcgattctcctgccccatcctcccgagtagctgggattacaggcatgcgccgccacgcccaggtaatttttgtatttttagtagagacagggtttcaccatattggcaaggatggtctcggtctcttgacctcgtgatccgcccacctcagcctcccaaagtgttgggattacaggcgtgagccaccgctgcccagccctgtgttatttttatggtcatcaaaaaggtagcatttgaccaggtatttgactggtggctattatgtttgtgtgtgtgtgtgtgtgtgtgtgtgtgtatatatgtgtgtgtgtatgtgtgtgtgtgtgtatatatatatatataaaaaataaaaatatatatatatatacaaatacatacccattttagaaaattgggaaaatatagaaaagaaaaaattcaggctgggcatggtggctcatgcttgtaatccagcactttgggaggctgaggtgggcagatcacctgaggtcaggagttcaagaccagcctggccaacatggtgaaacctcgcctctactaaaaatacaaaaaaatagtttgagaccagcctggccaacatggtgaaaccctgtctctactaaaaatacaaaaaattagccgggtgtagtgagtggcgcccgtgagctgagattgcgctattgcactccagcctgggcaataagagcaaaaccccatatcaaaaacaaaaaaacaaaaaaaaagaaaaaattcagccataattacaccacccagagaggatccttattatatttccttctagtcctttcttatatacatatgtagatacattacatatacttttggatcttgtattctccatcttatttgtaaatagtattctacgtaatgacttcatatttccttggcacatgaatggtttaaatcacttttatacatgaacaaattcataaagtggatatttttcagatttagaatacgtttttgtatcagtgttacaaaaggaagtggtggcttatgagtaatatatatatttataaaatttatatttacttaaagtttcattgtagtttagcaggtttttaactttctttattactttacagttctgaagtttataggttaaacttagaacaaggacgatacctgaatcctctacaaactgatgctgcgtgagtattgttttagtaattctgctatatacattttgaccaggaggtggagccagatgctcagtttgttaacaagtaacataaactattgcaattaagcaaaactcccagcaacttagttaaaaagtactgttgaatttattctcagacaaaaaattcactgaaagatctggtgattactttaaaaattaaatgaaagctttttttcatctactcaactttaagtcagttaaaaatactcagtttattattattacttgtagtgttctttaaatttacattcatggttttgttttgtgatattttctcctgtggagaacttttgaattaatttggagtgccatttttaaatttttatgctctgctagcggacatttaaggtttttaaaggtttccttttatcatacattatagtctacacatatgtactatgcagcaaaaatttttaggaatgaatccatcatcatcatcatcacaacaaataatagtgataaacacagtaggaaagcactttgtgccaggtgttattcagtcattttacctttattatctcattttaaacttagaacagatttttgtggtaagtaccattttacagatagggcagctgaggctcagagaggtaagtagtttgcccaaggccacacaactagtcaagggtggaagctggattacttctcattgtgtatatgaagagcttgctgaatttctcgtattgctttgagaggatttttaaaggttaggtgaacatgttgtgataagaaccaaataaactctaatttttttttatttcacattgggtagaaatgcttttatttttattaaaaaaaaaacttgtagtagtaacttcacaaatgcattatattgagtgtcctctgtaccccagatactgctgaacgctttgcagtctttttcatttaatccccataacaaccccccgaggtaggtgaaatatccattttacagagaaagaaaatgagacttagaatgatgtacccaggacaagcctgtcaaggctcaggattgtcatggtgatagcgtgtgttcttttaagaatgttacctgccttggaagaaaataccttgaaaaatagagtgaccctttcttctcatggtagtggaatagtatttcagaaggaagtccctccttgtttgtcacctagcaggtagagtgtcaccctggggatcagaaactccagtgactgagccaagcacttaaccctttcataccttggtgttttccatttgcagattagtaagagagaatctgtgtgtcttctttctactcagaatttgggttgactgtttatttatttaatattccttccccactaaagtaggtgctaactaattcattctttcttactgctttcctgtgttagggagaataatgtttgtgacataaattcagtgcatggcttgtttgccacaggaaccatagaggtaagcatatgttgactttattttttagaatatttgttttatatttgattggaatttttatttaaagactgagttgcttgattccttagagcaggatgataatgaggtgatagcttgaacatcctgtagagtaacattcagtaaatattgagatgaatgtacacaacatttttcttttaaatgataatatctttgaatcaatgtccttcacacttaccaatagttttttgtagatttgcatttttcacttaaaataatgataaatactcatagttttaaaaaatgcaaatatgtcagaagcatgtaattttaaaaagtgcccttttataccttccagtcaccaaatcctacaccccagaggtaacacttgaatggtttggagtagtatcctttcaaattttttttcctaagtgctatatgccaatatgcatatgtgtacatacatattttttaaagtggtttaccaaactgaaattgtattctactgtagttctccatttgctttttttttttagacataacagtatataatatacatcttattggtacttataattacttacgatgctaaactaattttaaaaaaatttacaggccaggcgcagtggctcactaatcctagcactttgggaggccaaggcaggcagattacttgagatcaggagtttgagaccagcctggccaatatggcgaaacaccgtctctactaaaaatacaaaaattagccgggtgtggtggcacacacctgtaatcccagctatttgggaggctgaggcaggggggcggaggttgcagtgaatgaagattgggccactgcactcccgcctgggtgacagagcgagactccgtctcaaaaaaaaaaatgatagtttacagatagcattctgttgtttgtactataatttattaaaccagtttcatatggatggaattaatggttttttttttactcaaattatttttatgttgagagattaatgcagccacaaaaaagaatgaaagaatgttctttgcagcaacatggatgcagctggaggctgttaccctaagtgaattaagacaggaacagaaaaccaaatactgcgtgttctcacttatgagtgggagctaaccgttgggtactcatgaccataaagatgacaacactagacactggggattactggatggggaagggagggagggaggcaagggttgaaaactaactgttggctaccatgctcactgcctgggtgacgggatcagtcacactgcaaacctcagcattatgcaatataccagtgtaacaaacctgcacgtacccccagagtctaacaaagaagttgaagttgtattttaaaaaaagattaatatttgaaatgggacactaagtttgatctgacagatattatgtaaaactatgttgaatgtgtttgaatactgttatgtctaaatcaagctttctcttggtagtcaggttacttgagattaccaaggggaagttttacaagagtttccctgagaaaatagtttttagggtccttacagggcagtctaggctagacaccaggcaatgtgctaagagaagttatgtattagaacgtgctgctcttccagcagctggtttaagaccagcctaggacatgttgaagggataggaggtagggatgctcaaagactgggcttccggaaattccttgattattagcagcttgcagtttcataagcatagtcagatcaggcttaacaaattcattttacattgattttcatattacatctcagattttagtttcttctttagttcttagttatcataatattgtcaaactaaatgtttgcattttgtgctttttgaagtgcctaagaggggaggtttggcaatggaaatattcaaatttaggtaatagaaaatcagtgtgcttaaaaatacattttgtatttacactggaagttatctgcatacccattttgtgtttttggaatgcaacttttcttttttatgtccataaaatttattaactcattttgagaagacatagaagactagaccatttggaattacctgctgtagtttaaaaaggtttcccttcgattattcatctttgcaacatacctacttgtaataatattaaaagattaatgaggtcagaacctcctaagtatattgaagggtttgcttttaaggtagttaatatattaaacaatcttaaaacatctttgtttatgtttttgttttatcattacaaaatcaaatgatagacaagaacacaaagtgaaaagtgtaattcccttccaccctgtcctattcctgtttccttaggtaaatactgttaataatttgctgtgtatcctctcaggtttttctgtttgcacaagcatttttttaaaaacacaaatgttggctgggtgtggtggctcacgtccgtcatcccagctctttggaagtgcgagtgggtggaacgcttgagtccaggagttcgagaccagcctgggcaacatggcgacacctcttctctaccaaaaatccaaaaattagacaggcgtggtgcataccatagatgcagctactggggaagctgaggtgagaggatggattgagcctacaaggtggaggctgcaatacgctgtgattgtgccctgcactccagctgggcgactgaacaagaccttgtctcaaacacacaaacaacgacccctcatttaaaaaagtaaattgcttttttgtggacacaattctagtacatgtatattcacatcattctttgtaatggctaatactcagtttaaatggacgtactacagtttctccattctgtttttttttgagacagtcttgctttgtttcccaggctggactcggctcaccgcaatgtctgcctcccaggttcaagcgattctcttgcctcaggctcccgaatagctgggattacaagcacctgccaccatgcccagctaattttgtatttttagtagagacggggtttcaccattggccaggctggtctcgaactcctgacctcaggtgatccacctacctcggccttcaaaagtgctgggattacaggcataagccaccatgcccggcctgttctgtttttttgggttttttttttttttagacggagtctctctctgttgcctaggcaggagtgcagtggcacgctcagctcgctgtagcctctgcctcccgggttcaagcaattctcctgcctcagcctcctagtgtgtgggattacgggcatgcgccactatgcctggctaattttgtattttttttttttttggagacggagtctcgctctgtcgcccaggctggagtgcagtggtgcgatctcggctcactgcaagctccagcctcccgggttcatgccattctcctgcctgagcctcccaagtagctgggactaaaagcgcccgccaccatgcccggctaattttttgtattttttagtagagactgggtttcactgtgttagccaggatggtctcgatctcctgacctcgtgatctccccatcttggcctcccaaagtgctgggattacaggcgtggccaccgcgcctggccgggattcttcttttcattaaaaaaaattttccccagctttttatttttaaaaagttcacatctttgtaaaagtttagtgatatatatattttgcattttcttttcccataaaaatgtacatgtattaaaaatgttttttgaaccttttgaaaataagttgcaggcattatgatatttcttccctaaatactttaaaatggatttcttaaaaataaggactttttctatgaaataaacaatgttaatgtggtttatttttgtatgtgttttaaggatttcttagcagcttttttttttttttttgagacgaagtcttgctctgtcgctcagactggtgtgcagtggcataatctcggctcactgcaacctccacctcccgggttcaagcagttcttctgccttagcctcccaagtagctgggattacaggcgtgcaccacatacccagctaattttttgtatttttagtagaaacagagtttcgccatgttagtcagactagtctcaaactcctggcttcaggtgatcagcccgcctcggcctcccaaagtgctgggattacaggcatgagccaccatgccccgccttctacagcttttatttaaaattgtttttcatttgcatagggtagagtggagtgctgggacccaagaactcgaaacagagttggcctgttagactgcgccttaaacagtgtcacagcagattcagagtaagtagaaattaatttgcaatgtaaatgttcatcaacttttaatttaagtaatgtgtctatattaaattcaaataaattgctacaggatatctgaaattgtactttccatgattgtttttcataaagatcctctcctgtaaaagctcactagtgagtaagccagatagaatttctttccaaaatactatacagaaggccttatttctttagttgctgtacgattttattaaaacaattacactacaggaatttgtattccaattttgtagaatctagtgatagaaccaggagtccaccacaaagtccacagaggtgtgctttgaattctaaggtggaaggaagcaagtgtttttttaatattttcttgttcctgtttgcctaatttctacatttaaaccaatcagaagagttttcactattatacatccatttacagttttatgattatttcctgagaaatgatacctagaacctgaatttctggattaaatagcatacatgttttgaaggtttttggtacattgctaaattgccctacagaaaacataacctcaggttaaatgtctccctgcatgcccagagcatacattgctcactctcctcagcctgggacgtccatcacagcactgctaataataagtcttagaaagagcctgaggatattgattaaataaagcttagtagaaatagtagctgacagatagtgctttctatttgccaggtactgggtctaagttctttacatatattaacttatttaatacgacagccctttgctgtaggcactgttattgtatttattttatagatgaaaaaaatattcgtcaatggcatacatgttactcagcctttaggaattatgttgcagaagcatatttattactagggaaaggtggtccaaatgcgcctgtcagtggaaaagcgagccatactgttgactatagagtgttaccacattgttatcagaaaaacagtgaacacaagcatagtcataggaagaaggctgggtgtattccagaatgtaaaaactagagggtttttttttttccgatttgcttttaggtaattttattttttaatttttttttaatgcttagctttttcgtttttgttttccctacaaaccttagaagctgtcacttctaggtggagcccatacaatatgagaaagcagtaagtgtaagtgttggataggggaagcaggctgtcattatttgcagatgatgtaagtttctctgcctgagaaactcaggagagtaactgaaaatctataagaactaatatagaccaggcacggtggctcacacctgtaatcccagcactttgaaaggccgaagctggaggatcacttgaggttaggagttcaagaccagcctggccaacatggtgaaaccctgtctctactaaaaatacaaaattagccgggcatggtggtgcatgcctgtaatcccaagtacccaggaggctgaggcaggagaatcgcctgaacccgggaggcagaggttgcagtgagccgaggtcaccccactgtactccagcctgggtaacagagtgagactccatctcaaacataaataaataggctgggcatggtggctcatgcctgtaatcccagcactttgggaggctgaggcaggtggattacctgaggtcgggagtttgagaccagcctgaccaacacagagaaaccctgtctctactaaaaatacaaaattagctgggcgtggtggcgcatgcctgtaatcccaagtacttgggaggctgaggcaggagaatcacttgaacccaggaggcggaggttgcagtgagccaagatcatgccattgcactccaacctgggcaacaagagcaaaactccatcacaaacaaacaaataaataaagtgttaccacatcgttatcagaaaagcagtgaacacaaacatagtcataggaagaagactggatgtatacccgagtgttaaaactagggttttttttctgatttggttttaggtaattttactttttttttttttaatgctttgctttttttttgtttgttttccctacaaaccttataagctgtcacttctagtggaaccaatacgagaaggcaataagtgtaagtgttgaataggggaagcaggctgtcatttccagatgacataagtttctgtgcctgagaaactcaggagaataactgaaaatctataagaactaatataacagttaaataaattggttataaaatgttcaaaaatcagtgaccttgtcagcactatccagttaaaaaggttataaatggaaaaacattctaataacaacaaaaattgtaaaactcgataagaacatatatgggccaggtgtggtggctcacacctgtaatcccagcactttgggaggccaaggcaggcagatcacttgagatcaggagttcaataccagcctgggcaacatggtgaaaacccatctctacaaaaaaatacaaaaattagctgggagtggtggcacacatctgtagtcccagctactcgggaggctgaagcaggagaattgcttgaaccggaaggtggaggttgcagagagctgagatcatgccactgcactccagcctgggcgacgggagtgaaaccctgtctccaaaaaaaatatgtgaagaaaatgacaaaggaataagtagagaagtatatcactatactgaaagaaatgattaagtatactttgaagagtaagtgactaaagttgctgtgcatatgaggcttcgaggttcccacaggtgccccagcgcagttacaggctcaagctctaggtggcagaagagacctgatgatgccgacagccaacagccaggactctaggtcctgggccaagggcatgtggacgataggattgatagtgatattgtccacttctgactcatcgcctagcactctttccactggagatcattgcttttggtgctgattgtcttggttggtatgtgagaagcatattctagagtcgtggccatagcattcactctgtctttggtactttcagaggctctagggtccccatttgaggattagtcttttattttagctgaacttggctaattttaaagtggaaatggtgtacccatgtccaaacaaaactatgtcttcttaagtatgaaaggggatgtttctataaataccttattctggcttaattaaaatggaagaaagtagattacgttttgtatataaagtgtaactttgattatgaaagtttgaataaaattactatttacttactatttttgagacagggtcttgctctgttgtcccagcagagctccactgcagcgcagtggaatgatcacagctcactgcagccttgacctcccaggctcaagcagtctcttgcctcagccacccaagtagctgggacaacaggtgtgtgccaccacaactggctattttttttttttttaattttttgtagagatggtgtctcactgtgttacccaagctggtcttgaattcttggcctcaagaaatcctcccacctcagcctcccaaagtgctggtattacaggtgcgagtcatcttaccaggctgcagttaccttttaaacagaagcctagaaatgtgattcctcccccccccccccattagatttgaagtgaagactaataatgaacttgttacttggaaggaggtttggccgtatattcatgaagcatgaatattttgcttttcaggataaacagtttaccaacaatctctgctttgaaatttaatggtgccttgaccatggcagttggaacaaccacagggcaggtaaatatgtttaatttggaaaccacatgtaagttggtatttcagtggtgtgtgtatgtgtcatgagaaatacactgcaggaacagaaaatgagatcatactattttagccagaccagagggtattccagaatgctggattcttccacaccttgagaaatcttgactcttgccttggtcagtctgcagtgctgtggacttagagctgcagtgggataggcctgcaccaccacacctggctaattttttgactttttgtagagacagggtctcactgtgttgcccaagctggtcttgaactcctgggctcaggcgatccccccacccttggcctcacaaagtgtggggattacaggcgtgagccaccgggcttggccataggtattctcttgttagtggtttggaacagcatttttcagagtctatgcaacagaattctgtggtcagacagtcttgggagtctgccagacttttactcttgaagattgacagtgggtttcaatactgttttaatgaaggctctcaggaattcttgcagacaagaaatatgtttaataaatatttccaaaatttgtgtgttcaaggaacttttttttttttaatatagcatcattaactatagcacatgccatgagtggtcagcagaacatgcattagcagtgctagtctgaggagtacttctttctttccttcaaggcagagcctgtacacttgcctcctacaagaggtctgaaaccctgccttggaggatttactttctttgtcatcatgggctagagggcatctgtcacctgggacttaatcctaggggagctttcccaggcttccttgcctctagtgacgggtccgaagagattctcccttctcccaagaagtcatagccttgccaccaccatctgtcttgatctactaggactgttcctgattatgtctttcatttttgtttatatctgttgctatgacactgcctggtacataggccctcagtatatatttgttgaacaaattaaattcttatgggctttcattttttgttctttcttagtatgttcagtagctcttacaaattaatcttggggttgaattcataaaatgtatactctaaggattatttaagagatctttctggaaagaatctcaaatctcagcaccttgagtaagggtgttcattgtgttcataacaaagcgatgaagcaaatggctgccattattctcacttagaaatatttcctttgaagataaaatgtctagtttgtttaaacagaaataattttttttcaggttttattatatgaccttcgatctgataagccattgctagttaaagatcaccagtatgggctgcccattaagtccgttcatttccaggattcattagatctgattttgtctgctgactctcgaattgtcaagatgtggaataagaactccgtatgtatttttggttgaaattacttgcttctttatttgcaggtgttccgaatgatcctttcctctccctttccttttttatgtgggttattgggaaagagatactgaatatacatttgggaacttagcgggaggtcagttacttttggatagataatatccatatttagataagatactcatgattgctttccttctgttaagttttcccaattatctagaattggcatgcattttagatgttaagttaggtagagagaaaatagtggtttacaaaagttgatctatgacccgagaaaccccctagatattgagattccctcacaggtgtaggaaaagtcttcagagctactaattatccttccatgcatgttggtattattacatatctcaaattcatacttttcctatttgattttttttttttgagagagtttgctctgtcgcccaggctggagtgcagtgccatgatctcagctcactgtaacctccgcctcccagtttcaagcaattctcgtgccttagcctcagagtagctgtgattacaggtgcatgtcaccatgcccagctaatttttgtatttttagtagcgatggggtttcatcatgttggccagtctggtcttgaactcctggcctcaaatgatccgcctgcctcgacctcctgaagtgctgggattacaggcgtgagccacctcacctggccttaaaagctatatttcttaagaatattttgatggtccttctcctcagctctaaatgtcatttgaaatgtaacaaaatcctatattgctggttttaatctgtcttctgcttttcatttttcattttaaaacctaagtattttgagagaatagtaaagagttgatcaaataaatgggaaaaatgcattcagtatagctatgtttttaagagttctttgcatttaattcattagaaacttagcatttttagtttaaaaacagatcacttttaaaaaattcccatttgtgatgaagtcgggtggacggcccaccagcctgagcagttcgtgcctaagcgcaagtgcccgtctattccgtgggggctgcctgtgcccaggcacacacgctgcagacagcccctcacagttcagctgcctgttgagtctctggctttctgggctgttactttggttttttaaatttcattttgttaattcctgaagtatgggtcttacttggcttcttttccttttttctctggatctgtcctggagaccagagctgtgttctacatccctgaggccctcacctaattcataggttctggtgactttgtttatgttacagagaagaacataaagaaaagacaggctttcagtctttctaaattcttggaagaattgccctgatgattgcccaggaagtgtctatgctgtctgctttgttggctttgagtttgaaggattttgagggcttttttaaggaagattcatgatcttagaccagaactttctctgctctttttctggcaattcaaactaattgatgttaaaacaatatttatttttaatactacaaatgcatatgtttttattcttaaaaattcataaaacactggtaaagtagaagttatttatccttgacctggctttcatccaaccaaagggaaagactgttagcaatctggatgtatctttccagaccctttaacttctgcatagtttccatcatgtggattattatcacctttgacacctttttgtcattgttgttccgtgccattataattcctttccctttgcttcctggtttcccctcttttccttcctctttcagtgggaacttgagaagaacagcaggtagctgtgtgaatttcactgttagtcttgggttaggacttggccgtgttcttcatcggacacaaaccatcttgtctgtgctctaacactgctctttttcgccgtgggcacttagtccatcctagtgtcagactttgcataatgagttacaaatgcaagagctggcagaaattttcaacatcacttcttgaaatcatcacactgtaattgctacagtaaattttattttggcattttttttgtttcttatgactaaagacttcctcttgactaacacccacgttacttggttttgcctgacttgcttaccttgtttatctttctcatcacctttttccacacccaccttcttagcatctttttcttttactttccttctcttaatttttaaaagataaaacacttttccccaacagttaaaatagaaatggtttagccctaactacatagtaactaacacttaagtatttgtaggatttcattttgtatttcatatccattgtctcacttgatcctcctcgaaaccttgcggtgcaggcatggcagtgttgtcctcattttccatgctggccatctctctcctctgattggtttgttttcttttcttttttcctttcctttcctttcctttttcttttcttcccttctttcccttcttttctttcctttcttccttccttcctttcttttcttcctttctttctttttttttttggacagaatctcactctgtcgccccaggctggagtgcagtggtgctatcttggctgactataacctccgcctcctgggttcaagcagttttgcctcagcctccctagtagctgggattacagttgcaggccacgatgcccggctaatttttgtgtttttagtagagtcggagtttcaccatgttggtcaggctggtcttaaactcctgacctcaagtcatctccacgcctcagcctcccaaagtgctggtattacaggtgtgagccactgctcccagctgtcttccgatttctttcaatacaagttaagctgggtacacttcacagattatgagagatttttttttaaagttgatgcataattcaaacttcatcttttcttgccatgttgacattatctttaaaatgttgtaatttttcttttttttggacaggtcacttcttctccttaggcctgtttcttcatctataaaatgggattttttgataaattgataagataaattctctaagatttttaagaatttaaattttgtatttgaagtaggctattttatttctttacataggagtagatggttgagttacagcttcagtttgacattgccaaagttgttgttctttaacttttaatacttcgtttttgcttgctatttttagggaaaaatatttacttccttggagccagagcatgaccttaatgatgtttgtctctaccccaactcaggtatgcattctgtagtgaacgttcagtgagacaaataaaaagatgcattctgtagtgaacgttcagtgagacaaataaaaaggctatacttttttaggttttaaacccattttatttcttaagatagaatttggctttgtcagcacaattcttggatatttaacttacttagaagaattaagagcaggaagtggtgtggatgattcagaaaatggcactcttaatgactcagtgctcagcccgcccagctattagtggaacgtggtaacagcatacaggtaggaggcaggtgaagtgctattttagtgtgctctttagctcttttatgtgattagtaatagtgtgtggaaattgagggtagagatttggagaaagctagattgcctgataatacacagatggctcatgaagccataggttttgtaaattctaagttgtatgctattcagcaatttacatgttaggtttcaaaatttaacagtgcattcaaggcaaatctgtgaagaatttcagagtatgggagaaaaatgagaatagtttctactctgagggcagaggtacccagatcatcttgatagagagaagtaaggcagagcgtgagaactcctatcacatttgtgcaaagagtactttgacagcttgctggagagagagagcttttaccctgtgaccaccgagagcggagcagtgagaagattttgctttgcgttgagctggagtgccgagtgagatttggttaggtggagttggggggctgaggtgattctcatgggagagcagtccaagatgaccaaaaaggatgggcacagagggctcggttggggtggggaggagtgtcctgtgcctgagctgtggtggctctgggaaggctgaagtgggaggcagagagtggtgggtggtagagggttgggcatgatgtgctaaatgtcttgggctccgtgtgctgtcagagaggacttgttccgactgtgctttcagaggcaggtctacccactgtgcaaagggtagattggttttggacaaaagtgccttggaagtaactgatattctgagctgagatggggagcacaggtgagagagcaagtttggaaagattatggcttctttttctaacgtgtgaggattaggaggtgacaggacagtggcagtatctggcactatctggcttcccatcaaaatcatctgcacagctttaaaggtacagctcccttgaccttatactaggtgtactcactcatagtgtctatggaaagggcttagaaatgtgtggttttttttttttttttgagttggagtctcgctctgtcacccaggctggagcgcagtggcacaatctctgctcattgcaacctcttctcctgggttcaagcgattctcatgcctcagcctcctgagtagatgggactacaggcacgcaccaccacgcctggctgatttttgtatttttagtagaaacggggttccgccatgttggccaggctggtcttaaactcctgacctcaagtgatccgcctgcctccacttcccaaaatgctgagattacagatgtgagccgccgcgcctggccagaaacgtgtgtttttaacacacttcccggtggattcttaggcggcaagccctgaaccgatccgcagacttgtgcttggggggcgtgtctggcgtccagtagaaaatgtggtcttggggtaagcaggtctgtagatagaaagttttgcgattatcccagaagtggtgggaatgaatgagattactgatagggaaagctgggagtgagataagaagtgagcaggagctggttcatttgggagaatgacggggaggagccagctgagaaaccggatgggaatggacagaacgacagtgccaggccccacggtttttgaagtatggaagagattcagtgggcactgcttagcaactactaaggattacagaagttggggcaggaaggaaagaactaagattgattgcatgctgctgttatcaatctggatgatggatgctgtaatacaaacttatttaatcttttataactgtgtagtcagtggtccatggcttttttttttcttttttctttctttctgtttttttcttacctcttaaggggtcagaaaaattgggtaattcattcagggttggtcacccagctggtgtgtggcagagcctcatttagaacccagccttcctgtttctggtgcccatgctgttttttctttttcttttttttttttgagacagagtctccctctgtcccccaggctggagtgcagtggcgcaatctcagctcacttcaacctccccctcccggattcaagcgattctcctgcctcagcctcctgagtagctgggattacaggtgcccgccaccacgcccggctaatatttgtatttttagtagagacagggtttcaccatgttggtcaggctggtctcgaactcctgacctcgtgatctgcccgcctcagcctccctaagtgctgggattacaggcgtgagccactgcgcccagctgcccatgctgtttctaattgcacactgctctcccaagaaagatgagaaaccctggactttataatttgcatttcatctgtaatagttgagagaattttattataatcatgggagtaaagtgaaattctggtgagttcaggaatagattgcagctgaggatgctgggtcctagttagggtattgaaatgacctacaccagggtctcggttaagtaggtaagtgagtaaatcaggtggagctgaggttggggcaagggtgacgagcagggatagtgcgactgggggagtgacagtttgaagggcacagagagttgggagagaaagagtcttaccttgggctgtacagtttggtagccactagccactcgtgggcattgacatgtactgtgagtataaaatatacattggatttaaaagacattctacgaaaaaaggatgtaaaatagatcattaataattttctattaattacatgttgaaatgaaaatattttagacctgttggattagtaaaatatattaaaattaattttaccatttttaaaaatgtggctactaaaaattttaaaatcacatatgtggttcacatgctctttccattggacagtgctggtctaaactgggagagcttcaacccttgaggatgctggtaaggtttagtagtgcttgtgcctggcccagtgtagcggggattgttgagcctggtaggctgcctcagtttttccattgtaaccaaggatatagaagcccaaagagacacctgctgaaatgagtgccaatctgttggcccccgcaggctgtgtgcctaaacagcttctccaggaggcagggctggagggtggactcttgtgggcaacttgatttctcaggtcagtttttgtgcatctcttcccccacctttaatggctgtaaagatctcttaacccacaaagggtgtgactacttggcaaagaagcctctttctgagaaatactcaggctcagactgttgaggaacccattcttgaaatgccaccactgacgacagtggttggaatcacaaggacaaggagaggagggaggctgatgttagcagtgcatgttgttacccaggtgactgctgaggaagagacttaaaatggattgagagggtgctgataattcaactacgcatctctggaatgctgattttattttttcgcctggtctgtatttatttattttttcagagacagggtttcacattgtcacctaagctagagtgtagtggcacaattatagctcactgcagccttgaacccctgggctcgagcgatcctgcctaggcctcctgagtagctgaggctacagatacgcaccatcacgccggctctcccctggcctcacgataaaaatttaaatgatttgtcatttaaaatggcataaaaattgtaaaaataagcatgcttttaaatgaaatttaaaagtgtttctctctgggaaaaacgcccaaaacacttatttaatgaagattgttgtggcctagtgcagtggctcacgcctgtaatcccatcatgcctataatcctgaggcaggaggatcacttgaggccaggagttcaagaccagccttgtcaacacagcaagactctgtctctactaaaaataaaaaaaattagcaggaagcagtggcactgtgcgcctgtagtcccagatactctaagggctgaagcaggaggatcgcttgagcccaggagtttgagtttatagtgagctgtgatcttgaaactaactgtactcttgcctgggtgacaaagcaagacctaaaaaaaaaaattatcttgctaacattttaattgtagaagcatttatagcacagtgattttaatagttacttattaaagtaatatttatgaagaaatgtttgacaatttggtcagaaaacattcttaatgagtagcattttaaaaagtctatttggcaaactgacctataggccaaatccagtccaccacttggtaatttgcagcctttgagttaagaatgggttttacatttttaaatggttggaaaaaaaaatctaagaagagtaatattttatgacatggaaattcaaatttttgtgactgaaattcagatttcagtgtctttcagcataaagttttatgtgaacacagccacccttgttcgtttatacattgtccatgtggcttttgcagcactgtggcagaggtgagtagttttaacagtgaccaggggggctgcagagcctgaagtgtgtactgcctggccctttacagagacagtttgctgacccctggtccatattactaatataaacaaaaatggtcactttatccacagtatttaattatgaagaatttcaggccaggcgcagtgtctcatgcctgtagtcctagtactttgggaggccgaggcatgcagatcacttgaggtcaggagttcgagactagcctggccaacatggtgaaaccctgtctctaccaaaaatacaaacttagctgagcgtggtggcaggtgcctgtaatcccagctactcaggaggctgaggcgggagaattgcttgaaaccaggaggcggaggttgcagtgagccgagatcatgccactgctctccagcctgggcgacagagcaagactctgtctcaaaaaaaaaaaaaaaaaaaaaaaaaaattcaaacatacagaaaagttgaaaaactggtagaatgaacatctttatattctctcctcaatgtttgttattgttgtcttcaccataattgatttatttatctctgtgcttctgtggttgttgtggtttctttgtggaatcactcgaaagccagctgcagacatggtggcactcacctgcacccagggtggcattgatctcctgaaaatcattgaaattattaggtcccttattgtgcctaataaaaatggcagcccttttctaatattatcttacatccagtccattttcaggttttcctaattgttccccatatgcccttttttagttaggtgtggtttttttgtttgttttttgtgtttttttgaaccaggatataactgaggttgtgtgttacatttcgctgttgtgtatctttagtttctttcaatccagtatagtcccccacatctttttcttttcttctccatgacgttgacttttcaaagatcaggccagtggtctcagaatatccttcatcctcgatttatgtgatttttttttctcgtgatgttgtttaacttgatcctctaccgtgtattttttctaaaatagaagttaagtctaaagacttaattaagtttagattaaatttggggcaagagtaatgtgcaggctgctgaggtctccaggtcgttgcagtattggagaggggtaaggttgatcccattgttaagtgatgtcgtcattacaaagtacagtttcttgcaaaccagcaactttaagcatgatgttttggacaaaggaatgactgttactatctaataactcgtaagaggttaatcaagagtagaaaagctagccaaataatttatttcataagagagcaggcagaacaagacccgtaggcgccccttctttgtggcttggatctgagtgtggcggatgattgcactccgcttttccttgctttcccacaccttttcctcccgttcaactctttgtgtctggtgcttaatcattgtgggcttaatcatagtttagaaaagctgaaactgtctttcttttttcttttcacttactcattttggagtaattgaagcataatcatgattatggttttgtaatatttttcttataccaaggctgctcagtatattgggaaatggttctgccttcctgccttgttcagggccctgctcctatggctcatcagccacctgtacagtgagcagctgctccatgccggtcagggcacttgaagagacagcacggctctatgacttgggtgtgcatcagattcatgacacggggagcttgtaaagcttacgtgtgtcttgagtcccactccagacctgtggaatcagcatcggtggtttcagaaccatggtagagagaaaagaacaggggcactgggctcaagaaagatccaattcaggcttaatagtggtagaaattacccaacctcggaattctcacctgccttacaggactgttgaagactacctgtactgataagtgtgaaatagccttttattccgtcagtgccttctaaatacatggaaaactgttagagccatctataaatatctttggtgccttgtatagtaaactcaaatgccccatactttcatctgaggttctaaatagggcaggagcgcccctgccagtcccctttggcacagttctgcgtgcacagcctgtctcctctgagctgttcaaggtggtgactgatgccatatgtttttgcgcagcacttcccaacacgtgtggtgaaggaccaggattttggttttttgttttgtttcgaattttctaatccactgcacgttgatacgtctgtaaaagacaatacaaatgaattactaggaaaatgatcacacatttggttgtcactgcagtgttgaattgcaggtttctaaatgcttcttttcaatttctgcacttatttcctggcctggtaacagtttgcagtctgtcactggggacacactttgagcagctgtagagcactgtgtttgtgttgtgaacttcagtgagtcctttagtccccagagcacatgcagatgagtactgatttgtgcatgtttctggggagggcactattttgtcaaattctcttttattgtattattacagcgtacagtgcactgcatactatacactatagtgtactgggtcatattggaaatgtgttcttttgactccaggtgctgatatcttttccttcctttaaaaatgtatagttttattgtggataaactacattaaaataaatttaaaggaaaaaagtcctcaatgccataatctctttacacgtactgtcacgtactattactgtcttcatgggtgaaaccatattaattctgtgttcatatgttttaagttgtcctcacactgtacttacggttatcttttgcttttcagtttgatgttatattaaacacatctttcacgttgccatgtggtattcatactgacttttttaaaatggtttcttacttgatcatgcaggaggtcttttaattttaccttagttgatgaagtgtcagagtcccatgttatgagccttggaattggtagactgtcagtggctctacttactagctatgtggtggccctgagcaagggaggtaacttgctgagaatgtgacttgcctggcgcgatgctcatgctcttctcttctcctgccttgatcatcttaatttctgctgaactaaggctttctttcacaggtttatttttctgtttctgcctgttagaagctgctcatactctttgggctctatgatgttctttttctcattcataattgctttcagccctgaccctcctcacttgagtttggtagtagacctgcttgtatcattagccgtatgtggttgtgtgagatcctcctccatttttagaaaacagtctagctgtgtccagtctgaatttttttgtgtaattacattagagccctttccgtggtttgtttggtaggtggtgttgtatttcattgtggaatgttcattgttgagtgttcagggttgagccagtggagaaggcttaggagaggtctttattaggaaccttccttttggttgtgaagatgtggcttctgtctccagaactgctttaattatgtccaaaggctcctggagatctttcagcagtgttgttagtggagacctaggaagcacaatcagcagaggcagtttctgtccatcatgacctcggtgaacgttgtttggaaggccagaaaaagtgctaagatgaaagattctacaagagttacaagctatgaaaaacagctctgactttgttttggtttaatttagacattattcttgcttttttagacttcattaggtgcttttagatgtttttacggggtgtgtgtgtgtgtgtgtgtgtgtatgtgtgtgtgtgtgttttgtgtgcatatatttttggtgacctgttggtcccagttcagggctagctcacacttctgagttattggcaagacgtggttttggtaagatagtatcgaggccagatgcggtggctcatgcctgtaatcccagcatgttgggaggccgaggcgggcggatcatgaggtcaggagattgagactgtcctggctaacatggtgaaacccccctccactaaaaatacaaaaaattagccaggcgtggtgggcgcctgtagtcccagctactcgggaggctgaggcaggagaatgacgtgaacccaggaggtggagcttgcagtgagccgagaccacgccactgcactccagcctgggcaacagagcaagactcttgtctcaaaaaaaaaaaaaaaaagatagtattgagttcctgcttgagtggtaattgactctattcactcagcatctcatttctgtaatagagtcaaatatcatcacttttacaaacttttgtgttaataaaaggaaaggcagcaaaaaatatttttaaaaacagaatctaatcattgcccttaacatttggtatattcatttatcattatgtgatctgataatctaaatgtcttccctctgtggattcctcttgtatcttacaaatagatttttaaaatgaattcttatttagctgatctgtagaagtctttatttaaaagcaggcgctcttgagtttgactttagctttaacattctctcacgactggggcatcagtccctctgagctttattttctgatcagtaaaatagggctgatgatacatcttctttgagagggttgttgtatgttcactaagatagtatatgtgaaagtgcctagatgattatgaaggactggtcaaaggcttgctggtttcagttttatttaaagtgcagtggtccagagcaggggatctgaggagttttgatgtttgcatattgccatgttggagctgcttcagaacacttgtggggaaggagtatgttgcaaaaatggcagagaaaagggaacaaaaccgagatatttgaatactttgatactaagtagtttagtaccaaataataatgtacttataggttgctcctggggttatagagaatcctttattgaatgccggaaagttatctctttcttcagttttgctttcttatatgctgatcccaaggagactcaattattaaccaccctgttggttcagtctgttataattccctgtgagggagtgactgtgctgtagtcagggctgttagagtccctctaggactttctggtgtagatgataacaaaatgtagacattttgttttgcagtcagttttgtaaaagttaggaatttgctttgcaaaagcaaagcaaatttgttctggaaaattcgaatttgttttgtaaaagttaggaatttgctgtgacattttgtgggaaatactatactttggttcactgactaacagaagttcctcaggcatttcagaatggaaagcaaatagaaaagggtactttctttttcctatgcattgacctttttcattgtatttatttttaggcatgcttctgacggccaatgaaacccccaagatgggcatctattacattccagtaagtaatacaaagaggagtttcagtaaaaataggacaagcaaagatactttttattatttatttaattttttgagacggagtctggcgatcaccgatgctggggtgcagtggtgcagcctcagcccactgcaacctctgcctcctgggttcaagtgattctcctacctcaacctcctgtagctgggattacaggtgtacgctaccacacctggctaatttttgtatttttggtagagacggggttttgccatgttggctggggtggtcttgaactcatgacctcaagtgatcctcctgcctgggcctcccaaagtgctgggattacaggtgtgagccaccactcccggccaaagatactttttaaattggatgtattgaggaacctgggtctacatgtggctgtgtacattagacacagtggactcacttttgggttgaatttgctttctggagccagtcaattcatgctcaaacattcttttatgggaactgtttaatatcatgttaaaacagacattataaattagtatttattcttctgatttacatttattttttgtttccaagtatttcagaatcttaaactttcagctgttagtgatccggaggtctaattctgaaaagtctattactcttcaagtcatctcactatagtttgtttcttttaaaaataagttacatatataaattatcatagatcatcctgatcagggatgacatgtagtttgccaaaaaaacctttttttccctccttaaataattcttctcttaaatagccagaagctcccacccttccctttaagtttatagtaaaaaatgaagcaaggaaatacgatttcataagcagaaaaacacatagtataaagttggcattagattactttatactcagcagacatctcccttacctgagatttgagaagagagtagagtgaggggtactgaagatcagaatctgagggaggtgaactctctgtaaccactatcatcttgcaggtatgaaaattattcctgtctatgatagtccttttaaaattgctcagttatgtattttcacacataaaaaaagcatgctgcttgctgttgactctgtggtttcgggatactgacgtgttgttgaaagcacttagagatatttcgtttggttggtagtgaaatgaaggccgttcaaacaggaagcattttggttttcctaagttaccatttgttccttttcccctggactcttgcagatactgcattcatattcctgtcaacttatccatctttccttgtattcacttgttaataaatattatggactacatcaactgtgtgttgggaacgatgctgtatgctggcagtattacagcatccagggtgctgcccttctctttgaggagttactgttgggaatccaacaagaaagtaggcagttgccattcagtgtgaggagtgctaccagggtactgtggtgggagcacgtaggagagaccctgtacccactgagggcccaggagctgatgagaagtgtggttggcactcagggaatacttcccagagggagagactttgaaggagggaccgaaggatagctgcgtcgactgggtgaaggggtggggtggagtgaggtgcccagtgggagaagggtttttttttccttttcagtcgactttcccaggttggacagtagatcggatcttgacagtagagtgggtgcagagctgcgggagcaagtacctcccatggctgagcatttgagcctgtgggggcaggtagaaagccaggttaggaggggtcttgtgagccggctgtggggatgtagggcagggagtcctgacaagagttgtaagcggggggataggatcagacctgtgttctgaaaagattacttttgctgccgcaggggaatgcattaaacaggctctaatctggacgcaacaagcacaggctgtggcagcccacaggagagatgatggcacctgcattacctgtgccaggctccctttctagtagttgtggctctttggggttctgggataatgtgagagaagtctaatctggtaggcagtacttgcagacgattcatccttgaattgcctggtggcatgtctcagaggtgttcattgatagagagctgtatagatcacaagaatgctgccctcagaccagcgttacgtagttttctcccagtttgtgcccctttggggaacattgtcaggagaggcagaataaatcagcttgcccctaaccttttcatcatgagaaaggtctctttcatcttcctcttagaagtgcttattgtattttgatcactacagcaacatggacagcaagtgcctgtccatgccttggatcttagatcccttctgcatgtcaaaagtagatagaatcaactagtgggcaggtgaaaagcactctcagtgtggagtgctgcttcgggaggtctgcctagtagaggaggagatgtgggctggagagccgcgttgtggagaggtggggaggggcagtcctgaagacggttgcagtgaggccaccttacaagcctgtgtgaggatggtggccatgggcatagaattgaaagggttgttatggttgtaagagacttgaaattgatgagtgtgggaagtaaggaataggaaaggaccaaggatgacaccccggtttttgcttgggcaaatgtgcagataactatgtcattctgagtccaggaagaggcaggagaatattaaacattattttccctttggtattttctgcattttataaaatgatcttttaaagaaagcaaaacagcttttttgttcatgcaaacaatgtatgcgtattcctatttattctaagtgggttacaaggtatatgaaaataaaaaccagctattccctcttgataatactataactaccattaatatttggatgtattgttttttagttatatttgtgatgttatgtgtgggaagttgtatttttttttttaagctttaatgtttttttttgagacggagtttttgttgcccaggctggagtgcagtggcacaatctcggctcactgcagcctccacctcccagattcaagcaattcttctgcctcagcctcctgaggagctgggattacaggcatgtgccaccacacccagctaatttttttttttttttttttgtatttttgtatttttagtagagatggggtttcaccatgttggtcaggctgatctcaaactcctgacctcatgtgatccacctgcctcggcctcctgaagtgctgggattacaggcatgagccaccgcacctggccctaatttttgtgtttttagtagagatggggtttcaccatattggccagactggtcttgaactcctagcctcaagtgatccaccgcctcagcctcccaaagtgctgggattacaggcatgagccccaaagttgtattttatatacaaattggttcctggtttcttcagttaaccttggaaatattaattctaaggtactgcaattacctaaaacatttttagttgcctctattatatgtcattggctggtttatgacatgtctattatcttagaactgtaagagacccattgtttacttctgattctctggatcagtttcttagggtgggcgtttttgttccaagtaatggtgactttaattagcatgagtatgaggggctggtgatgagaagaagtatgaagtatgaagtgtgaggggctggatgatagccaggtgatgagaaattgccttcttgacaaatgttagcttatcttataagacctttttagtttcaactttctacctgagatttaacagaaagctgtgaaaaaaacatccagagagccctctcctaggtgagctgcatatggggacagtgtgagcagaagttgcttttgctaagcgaagcattatgctgaaacttggacttcagtgttcctttctgacctacctttctgccctgctccctcccacagtactgagtgatattttatagcaccacttgtctttacttggaaactgctctttgtaaactccttcaaagcaaagggagagcccaggggtctgaaagcctgccatttttcataagattttatcaaacgtaccaagttgacgtttggcaggaaggttcatttgaggcctatagaaccaaagaaatgtgtgtttaatgtatgatccatgccaagtttaggaagcctggactgtgatttgtattaacatcttataaatcaggtttgaaaactttttccctccctctttggggcatactgaagatgaaggcaacttagtgttcttttagcttgttaattttttgcctatctgatatcatctttcttgagtaattgaaatctttataaactaatgcagttcctgatacaccaccttctggcacttagatatctctgtagccagcttgtcctttgagaccaaatgggttgtctgcagcccctgtcccattttctcagttctttccttattttttatttttatttttatttttttaattctctcagagaccaggttctattgttttgtttgtttgttttctccagggtctaattcgtctgcagcttcagagactaatgccaagaataatttttcaagcttgctttttcctctgaaacataatttaatcttaggttagttctttataattaacatccttggcaactatgtagacttcagagggaatccaagtcccctatggcacccaacccaaaacctttctgcttaatggtgtttctgttggaaatgctcctgaattccgagcccctagcatatcagggcactcctgcagccactcattgcttggtggtggtggttggggtgtgagtgattgcttgctgcttggtaatgtggatgtgtaaacttgaggaaaaatgtaggaggaaaactatttgtttgggaagctgtttgatttagatggagtctcgctctgtcgcccaggctggagtgcaatggcaggatctcggctcactgcaagctctgcctcccggcttcacgccattctcctgtctcagcctccccagcagctgggactataggcgcacgctgccacgcccagctaattttttgtatttttagtagagacgggatttcactgtgttagccaggatagtcttgatctcctgaccttgtgatccgcctgcctcggcctcccaaagtgctgggattacaggtgtgagccaccgcgcctggcccaagctgtttgatttagaagaataaaagtaattcagttggccaggcatggtggctcacgcctgtaatcctagcactttgggaggctgagatgggcagatcacttaagggcaggagtttgagaccagcctagcaaacatagtgaaaccccatctctactgaaagtacaaaaattaaccaggcgtggtggtgtgtgcctgtagtcccaactactcaggaggctgaggcaggagaatcgcttgaacctggaaggcagagggtgcagtgagccgagaccacaccagtgcactccagcctgggcaacggagcaagaatctgtctcaaaaaaaaaaaaaaaaaaaaaaaaaaaaggccaggcacggtggctcaaacgcctgtaatcccagcactttgggaggccaaggcgggcggatcacgagttcaggagttcgagaccaacctggccaacatggtgaaatcccgtctctactaaagagacaaaaaatcagccgggggtcattgtgggcacctgtaatcccagctacttgggaggctgaggcaggagaattgcttgaacctgggaagcggaggttgcagtgagctgaaatcatgccattgcactccagcctgggtgacagggtgagactctatctcaaaaaaaaaaaaaaaaaaaaaaaaaagggaattcagctataagggtatgtgctttgtttttgtttttttctttttttaatgtcactatttaagatgttataaagaataaatacattactgcacccagctttcaagaatggcagttaggtactgttacgttacgttacgttacgttacgttacgtcacgtcacgtcacgtcacgtcacgtcacgttacgttatttttgaatgagacagggtcttgctctgtcaccctgtctggagtgcagtgacgtgatcataactcactgcagcttcatcctttggggctctagcatcctcccgcctcagctttgtgagtaggtaggactacaggcatgtgccaccaagcccagctaatttttatgctgtttttttgtagagagaggatctcactgtgttgccaaggctggtctcaaactcctggcctcaagcgatcctcccacgttggcctcccaaagtgttgggattacaggtgtgagtcactgcacctggccagttattttattttcaaacattttcttaagaaactcctatattatttctattaaaatattttgactgtttaaaataaaacactgattaaatattttaacatttaccatttaatttaaaatttggaaagtactcttggagcctgcaaatgaggcggttaaaaacatgaagaacccttctaacttgcactagtgcttctgcgtctgttcagaatcgcactggagcttatccagcagttcataaacccacaaaactctgtcttcgcaaatagaggacactatgtgttaagaagcataaggcctcaaaaatacataccacacagcttcacagaggcacgcaaaccaaaggaaatgcacaattggaagccacattttttggaatgtaataaaaggttgtttagtgaatgtttctaagcctctcagctgagtaggtagcacactccccgcagaggtgaggccttctgacgccatcacagggttcaacgctggtatctcctcagggcttcagtcactgggctagggcagacatctgtgctcctgcacctgtaaagatggcaaggcagtaggtgctgcagaattttaggggttgtcagggagatgcttttgaaatcattatagctttgggaagtcagttttagggaaatggcatggacatttttctagtaaatgtatgaatatttgcagtctggcagatttttttcttgctcaatgaagaaatacaaatagatattatagtctttttctcaggtttttttctgtaagggtttttggttttagtgtgtgtgtgtgttttttttttttttttttttttttttgagacagtgtcttgctccgtggcccagattagagtgcagtagcacaatcaacctccatctcctgggtcaagcgattctcttacctcagcctctcaagtagctgggattgcaggtacgcaccaccacacctgactaatttttgtatttttagtagacatggggttttgctgtgttggccaggctggtcttgaattcctggcctcaagtgatccacccatctgggcctcccaaggtgctaggattacaggcgtgagctaccacacccagcctctaagggttttgtgacaaaaacaaatttaggtgcaaacaattttaacttctgtctgtggtgaattgaatttgttagtctagttctaaactccatgactatgtcaatgactgttgtctgttagagaggtacttatggatactttttaatcatcgctatgtgatcttcttcctatatagatggtatcttttttcaagttcagtatttgaaacattactgttctggtgtgttttggcataattttccaaagtcttaagaacacagccttactcctcagcttcattaagaagatacttttttttttttctttgattgaaggtcgcactctgtctcccagggtggagtgcattggtgtgatcatggctcactgcagcgtcacaactttctgggctcaggtgattttcctacctcagcctctcgagtatctgggactacaggtatatgccgccacacccagctaattttgtttggtgttttttttttttttttttttttttttggttttttgtagagacagggtttcactatgttgcccaggctggtcgccaactcctgggctcaagcagtcttcctgtctcggcctcttagagtgttgggattgggattacaggtgtaagccactgtgcccggccaaagatgccatattttatcagctatccagagtatatgttgttttagtttaacggtagatttgacagtatcttgaaaataagtgtcaaaaattcctggatgggccaggcatggtggctcatgcctgtaatcccagcactttgggaggccgaggcgggtagatcacttgaggccaagagcttgagactagcctggccaacaaggcgaaaccctgtctctactaaaatacaaaaaaatagctgagcatgctttggcacgtgcctgtaatcccagctacttgggaggctgaggcatgagaataacttgagtctggcagacagaggttacggtgagccgaggtcgtgctaccgcactccagcctgggtgacacagactctcttaaaaaaaataagaaatacatgaaattcctagatggacgagtgttttgctattttgtctcttaatatttttattttgtcttcctatattataaaagtaaatgtaggagaccaacaagtgcttgtatttgttcagtaaggatatattgagtacggtactaggctgcaggaatatgttggtgaagaaaaccaacatgttctctattgtacactcaccgcccttgtgagcttacaatctaggtgaggggtggtgataaacagatctgtgactaagcgctgtgaaggaaggcagcagggttcagtggcttcctacgcattttccctaagtcaagggtcaggcactttgtatcagtctcttttttatgtagatattttatcagcccccttcttctgtgtagatattatatatagatttgtaaaaatctcccccaccttcatcttaaatttgaatttcagggttggagacttggtgttttctttgccttatgatcatagcacatatctggggcaaaatagtgaatgaccatatttgtcccacaatctctggaaacaaaagagaacagtagagagaatgttggccgatagagaacgtagaggttgagcctctataatccaaaaatctgaaatgcagacgctccaaaatttaaaactcttttgagtgccaacatgactccacaagtggaaaatccaaacatgagacttaacctaaagtctgtttcctgccaaaaattattaaaaatataaaatgtttaaaggtataaaattaccttcagtctgtgtgtataaagtgtatatgaagcatgaatgaatttcatgtttagacttgggtctcatcccaagatatctcattatttttatacaaatgttccaaaagccaaaaaaaaaatcaaaaatttaaaatccttctgatctcaagcattttagaaacaggctactcagcctgtattgcttttcctggacagacgtgtacagtcatcctccctttctccttgaacatacatctcatatgcacatcattttactttatctccaagtggtatttagaaacacagttgaccaggcctccttaaaactctgtgcccagcttctagaaggccacattctcctgggattccttctttcatctagttatctcttttcagtcttcactggctcctcctcctgctgataacgtcctagacttcggatcttgcctctctcccctgacctctgaatgttagtgagcgctaggacttagtccttgtctcttctttatttatattctctcccagggagcttgtttatgcctaggctttatataactaggctttatataacagctgtgtgttaatgacgtccaattttccctctccagccttccctctgagctacagaggtacatatccaccagtctactcggcttctccacttggatgtctaatagcacatcctgtttaatgtgtctacatcagaacttctgatccagctccccacctgcaccccacctgccagggtctccatttcagctgaagccttgttgttgctcactcggctgtctaggcttagagcgcaggagccatccttgtttcctctcctctccacttcatgcctcgtcatccagtccatcagctgtttgcagattttgttccacatccagccatttctcagtgcttcccttccatcaggcctctggattactgtaatactggataactgatctttctgcttctgcttttgtctctcttgtaacctattttccatgtaacagccagactgatgtaaaatattaaaaatataaacaaaacaggcccagtgcggttggtcacacctgtaataccagtgctttgggtggctgaggcaagaggattgcttgagcctaggagtttgaaaccagcctgggcaacatagtgagaccccatttccacaaaaagttttaaaaattaaccaggtgtggtgacatgtgtctgtagttccagctacttgggatgctgaggcaggaggatcccttgagcccaggagtttgaggctacagtaagctatgaccatgctactgcactccagcctgggtgacagagcaagaccctgttgcttaaaataataataataaatatatatatatacacacacacacacacacacacatacatataaacaaaacaaatataaatcagattgtgttactcttctgcttaaaaccttccagtggctcattattttgcttacaacttgaaaagtcttacataatagaaaagcagaaagagactaaagaatcagattctgttttcttctcactcaacagagaatagatctctattaagcattaatctatttacaaagatcaccaaatagtcagactgttaaaccaaatcctcagccactgccaccataaatggggaataacttatgggctgttaaaccaaatccccagccactgttaccataagtggggaataacttatgggctgtatattaataatatatcaatatataattaataccaatgttatgatacattaatatataattaatatatcaattatatattacataagcattattagataagaaatttaaaattagagccttttgcggtggtacccacctgtaatcccaactactcaggagtggagaatcacttgagcccagttcaaatccagcttgggcaacatggtgagaacttgtctcaaaaaaataacggaataactaagtaaaataaaaaagaaagacagacacagccaagttctgctgttcatttggattcaccccgcgagccaaggacaactgtgcttggatttcaggagcccaagtatgttacactctgatgaggaagttttcctggttctgtcaggtgagtgcatcaggtatcttagtgagacctccaaaactgctaaaagataacttccccaaaacatgaaatcatgattctcatatagagatgaaataaatacatcttaaaattttaatttaggcctagtgcggtggctcacacctgtaatcccagcactttaggaggctaaggccgaaggatcacttgagcccaggagtttcagactagcctgggcaacataaccaagacactgttgctattatttttttaaataatattttaaaatttaaaaatttcacattttaatttaacctgtaaattaaatgagggaaccaggcccatggttaaatcaaaaggtaaaattttaatttaacttttaaaaggaaaagtgtaaaaaaggacaaatttacatggaataaagttatattgaattgggaatgtgcaagtagacacaaaatggtctattttggactatttggggccttttccaaaggtataaactgtccaccagacataattcatttgcatgtctatagacaattattttgcattgcttccagttacttacaatttgcaaagttgtaaaataggtcctgtagaatgagaatcagatgatcttgcagggtgtactctagactggggtttgggaaactacacaccagctgtctgtttttgtaaataaagttttattgaaacacagtgagcccattcatttatgtattatctatgcaactttctgactataatggcaaagttgagtagctgtgacagagaccatatggctcatgagccctaaaatattttctcttcgtttatttacttctttacgtctatatttccccattgtaatgtaagacatgaatgcaggggcgtcattttgtctttttccctgttatatcctcagcacctaaagcagtgcctgtcatactgtaggccctcacttaatgggtgtggaaaaattaatgagcacacaagtgagagtgacctgattactgcaatttggagcgtctttgataatggttgtgtactttgaccatggctggtttgcagtgcttcttgaccgtacttaatgccagattgaaattttgcatttgcccttttctgctactactattaaaatatagaaaggcactctgggaggccgaggcgggcaaatcacctgaggtcgggagtttgagaccagcctgaccaacatggagaaaccccgtctctactaaaaatacaaaattagctggatgtggtggcacatgcctgtaatcccagctactagggaggctgaggcaagagaatcgcttgaacctgggaggcagaggttgcagtgagctgaggtcgtgccattgcactccagcctgggcaaacgagcgaaactccatctaaaaaaaaaaaaaaaacagggagaacatggttcatgtgtgccagagtataattttcatacagtaggattagcatcagttctttggctctgacagtgccttcttgtcagccacatctgagaatggtggtatgatgcaatcgttgtgtttgggagtgccaacaaatttttaaaagtaataccttgtccaaaagatttaatagtgattctgttaagaagataggttaattaaacttttttttcctataaaaatccaaaaggagaatatgaaagcaagggcatttagcttttgtcttaatttttttggaatttgtgcagaagttggctttgcatctagagtatgacagccttattgtatgttttaaagattgaaaagaatgccttttgtttttctctccatgcttttaactggagttgctgggagtgctgtacacgtcattccctaagatttgggtttgaatcaggaccacgattggtccagctgatgtatttcagttcaaagccaacaatgtaggatcatttatgtttactaaattgatattctggagaagtccccagtaagagatctctttgccccattagtatatgttgaaatggccctgaatctgttagtgtccgtgtagaatcctaaaaaggatagatcacactttcatctaaagtgcacatttaagcagagccctattagacatactgacagatgtaattttgccagaaattgctcttttatagtaccagtagcaacatattctctttgtttgggaaggtagtgtcagatgaaaagaaaactcttccctagggaatttatcagcatacaaacgatgttccagacagaatgtaaacgggaaagtcgttgctcaaatcttgtccacactaaaggattcatcagtgtgctttaaaggaaaggggaagctttggagcatagaccatcagagctagaagggatctccaaggtcatctagtccagcccttaatttgtagctgaggaagcaagtttttgggtttttttttgttttgtttttcctgagacagtgtcttgctctttcgcccaggctggagggcagtggcacgatctcagctcactgcaagcttcacctcccaggttcacaccattctcctgcctcagcctcccaagtagctgggactacaggcacctgccaccaccatgcccgactaattttttgtatttttggtagagacggggtttcactgtgttagccaagatagtctcaatctcctgacctcatgatccgcccgcctcagcctcccaaagtgctgggattataggtgtgagccatcgcgcccagctgcaagttattgtttaaggtcaaatggcaagttggtgacagctggatctaaaaagcatttcttccttccacattgcatagtagaaataacttagactttggaattggttggacccgagtttgaataccagcattgccatttataaatgtgaccttgaatgagttacttattctctccgaacactagtttcttgagcaacaaaagaggaatgatattgtaaggcatttatgtagaatggatatactcattcagtcatttctcatgttcagctgatttcttgtaatgaacagaattcacggggtccgtgggtggcaaagagtatttggataaaattaagtcattaagctgggtgtggtggttcatgtctgtaatcccagtactttgggaggatgaggtgggaggatcacttgaggccaggatttctaggcagcctgggcaacatagtgagaccctctttctgcaaaatgttttaaaaaattagctgggcatggtggtatgcatttgtagttttagctactcaggggactgaggggaaaaagaataataattatggcattgtgtgagcatggacttttatttagcttttagaagggaatatcatgttgagcaaaataaagctatacacggaaaagattgtgacaaacttgtgaatgtgagcaaggaaaatgagttaagacatgatttgggattgtttagtctgatgatcacttaagatatagattgagagaggtctgttgtgccattagttttgccattgactattgaaacagaaagcagtgataacatctggttgtttaaataagaagtctgattttttaaagtgaagttcattttccccaattatatcatcaaggcgcactctttgtacaaaatatggcaaatacagatgagtagaagaaaactcaaatacccttccactgcctaaagacaaacattaacattttgctgtattttttcaatatttaatctgaaactttgttaatatggtttcttatcttgttttttttcccactaaacatttctttattattataaactcttggaaattattaaaaaatatattttctgtatgaatataaagtaatagttatttttgaaaatacataaatatcagaaaaagatgaaaaatttataaatctcactagtcagagacattcttgccaacatttctgttacattttctttgcatttgggatattttagtggctactgattggatttaaagtgaaatcctgtcagaagttcatttagcttacatcagtttcaataaaagcccttcaagatgttggaggctggaggtggaggggtggtggggggagggagggaggtgtatgtaggggagaggtggagggagcaagcgagcatgtttgcactcttaggcagtttcacttacgtggctgtccattcgctctggggggcatatgtcctggactaaacttgagatgagagggcctttctcaaccgagaaaacgtgttcctaattccctaaggcatccagtttatgtgatcaattaccttctcccccatgcatttaggatggctccagtgatggatcgttgttgggagaattgagaaaagagttactcggttatttttgtgttcttagttgagatgaggaagactgtttgaaaaagtttgcttaaatgtgttgtttcctaatactgcgcatgacagcatcacactgagtgtgattctggtcatttaagacatgggattttttggtatgacgtagtcaccaggtgcaagtctcctgctgtatctggtcctattctaacaccagatggaaattctgacgggcctttcaagtttaggtttgcttatattccatttagtcttatctgcttgactttagaacctgatctttatataagagattaaaccaatgaaattaaacttcagaaatatttaatgcaatggatagagtaggagaaggggaacaattttaaaaatacagttagcggaatgggtgagatggtgcctagcagcagcagcatctataacaaaaagagctctgttggtttcagtcaactgtaagtcaaaggaataaaggttaagtagaatgttggcagtgactccacttgtgaatgggggtcgagaatgtcaggatagcacagtgaaggggctgtcttggggctcttcatgtgcagagtgtacctgtgtgtgttatttctgctagtggtggtaagttggagaaagctcagaaaagaattcaagaattgtgtttccaggcatcatctagatagagaaggcatgattttaggatctaggaaaagagtaagatcatgcaagaaagctaccttgtatgaggtacagaaaatgataggacattggcctgaagacgaaagttttcattgtttgagggtgtgggaagagctgtcagacaatgggaggcagtgaagcactcgcctttcacagcttctaaaaggaggaaaaagacaaatttgaatgaaaaatatgatttactttgaattgagttcaaaatttgaattcagatgtatatttttaattttttattatttttattttttaaaattttaactttttttagattcagggggtacatgtataggtttgttacatgggtattttgtgtgatgttgaggtttaggatgcgattcaaccagtcaccctggaagtgagcatagtatccaaagttgtccctccctccctctctccctccctccctctctctccaaaagatgtgttttttgttgttgttgtttgtttttttttgtttgtttgtttgtttgttttttttgagacggagtcttacgctgtcacccaggctagagtgcagtggcgcagtctcagctcactgcaacctccacctcccgggttcacgccattctcctgcctcagcctcccgagtagctgggactacaggcacccgccaccacgcccgactaattttttgtatttttggtagagacggggtttcactgtgttagccaagatagtctcgatctcctgacctcgtgatctgctcgcctcagcctcccaaagtgctgggattacaggtgtgagaagatgtgtatttttaagatgtcttgattcataataggataaaagaaacaaatgcctaattttattctccaagaaaggtattacaatgataaagccaagcctataagaaagatccggaaagataagacatcttatggaaggtaaaagacctaattttatggggaaaaagtgtggagttctgttttgtgatttttcagttatatattcataactatgaactgggaagcaaggcacaaatgtcaggtggttaatacagattcttttgtaagacaaacaagttgtttgtgactttacaaaggggaaatgtggacttcctattttaatctaaacactttcaggtagtaacagtatctgtggcctttttctcaacaaaggatatcctccccgtttcccatcacaatttattggatcacaagaatagcggacatacagaagcattaatgtgtgacaatcaggaagtaattttctgagcatcctgtcgcattttcaaagttaatttcagttctgattgggtaaaaatgtatgtaattttcatggagatatttgatacacatatgacatatattgtgttagtgtatcagatgatgtttgtttttgcttaaatagtcttacatctggcatgtccattttcttgaaaataaatgacaacttcctattcagatgctagtttgacttcaatgttgaccaaaggccttgtctcctggttccggcatttcctccatcttggtgcttaccaagtcgatctcgttgccattcttattttggatgagatatagtcggacttaaacctagtatttcagtgtcctggttgtgtagtcacttaggtggcgatgtctttagttaacatggccattatctcttctttttttttggttttgttttgttttttccttaaaaaagaaggtagcttatacaagtaagccagaaatttagactacattcttttaaaaggcccaccttatacagaaaataataagaaagttctaggacttacaccatctctactttgattcagtgttctcaaatcccaacgtaagtttctcttctgatgcccacttaggatgtaagctccacaaggcgggaactttgtatgttgtgctttttgctgtgtccttggttcttagaacagtgtcttatacttcataggctttcattgactccatgcatgctggtttaaagtaatgaatattgacccttttaaaatttgttttatttattattattttttgagacagggtctcactctgtctcccaggctggagtgcagtggtgtgatcatggctcactgcagcctccaaactcctgggctcaagtaatcctcctacctcagccccatgcagctgggactacaggcacataccaccatgcctggctaattaaaaaaaaattttttttttcatagagacagggtttcactctgttgcccaggctgatcttgaactcctgagctaaagggatcctcccatcttggcctcccagagtactgtgatcataggcatgagccaccacacctgacctgacacatttttttaatgtattatgaaaaaaatgtattttgtctctcattggttagaggagaaaaaatttcaaatagacataaaagtagagagaaatgtaacaaacccgtcttctacccatccttttgctcccatgtcatcagcttttcccccaggctttttttttgtgggggtggggtggaggtaaagttggcttatactgtattactagcaccgtaaattgctctagaaagtagttattacagattgttaaatgggaacgaatattagatcttgacatgggcacaaatcctcatttggattatatgtttaccttcttgaggaacagaacattattcttggttggaaaacaagtaatatgtaaatgatagtagtgggacattgaaagaaaggttagatctgcctgtccatgtttcttgcatgtctgtacatggttatgtcattcactcattcagtggtctttattttttagagcagtttttggctcacggcaaaattgagtggaaagtacagagttcttatgtccctcccccacacgctccctcaccatcagcactttacaacagagtggtccatttgctgcagccagtgaacagacattgacacatcaccacctgaagttcatagtttacattagagtccactcttggtggtgtacattctgtgggttttgacaaatgtataatgacatgtatacacggtcataatatcacatagaatagtctccctaccctaaaagtcctctgttccacctgttcatcccttcctccaccccacaaaccccgagcaatcactggtatttttactgtctctagttttgcttttttccaaaatgtcatatagctgaaatcatacagtatgtaggcttttcagattggcttctttcacttaatcctatgcttttgagattcctccatgtctgtttgtggcatgatagctcattttcctttatcgctgaataacattctcttgtctggatgtactgcagcttgtctgtccattcacctattgaaaggcctcttggttgtttccagttttggcagttaggaataaagccgctctaaacattctcgtgtaggttcttatgtgcacataagttttcaccttgtttgtataaatgtcaaggaacccaattgctatgtcatatggtcacaatacgtttagttttgagaaattgccagatggtcctccatagtgcccatacctttttgtatttctttttttttttaaattcataatcagtgtttttattattttcgatgatggctcatttctaagttaagtgatgtatactgtctacatttcccatctataagcttttgtttttcctggacttttgttacctaattttgatttgcttaggttattattttttttaatctatggcatgtcttcctatcgctgtgtacaatggctttcagtagaactttttacatcttcaaactcatcagataactgtgttttaatatctttttctgaggacattcctcccaaatccctctgttctgctccacttggggctgataggtccttttctgttttgagacagggtctcactctgttgcccaggcttcagtgtagtggcacgacgaaaaccagagacctttgttcacttgtttatctgctgaccttccctccactattgtcctgtgaccctgccaaatccccttctgcaagaaacacccaagaatgatcaattaaaaaaaaaaaaaagaaaagaaaaatctacttctggagaaacaaattaccttcccatctcttttgtcaggaaactcttggatgatatactgaccaaaacagggaataacctaacagagaggaagacagggattttaggaaaccagagatcacacaggaaggaggtaaagggaaatcccaggatgatggcaaagggaagtccccaaacaacagctgtgcaacaagaataaagacctttttgtatttctgacatcagtgaatgagagttcctgttgctccacatgctcgtcagcatttggtgttgtcaatgtttttgcgttttagccattctaatcgatttatagcgtatagtatcttattgttgttttaatttgcaaatatcatttatttatgttggtcagtcatgaaaatgacacaccatgatttttgtctttttgggcttaactagatagttgtgttaattagttgttagttttgagtatttggggggctgggtcatttattatacaaacatttgttacacaaacacttagtgagcatctttcctgtgccaggaccaagggtgggatatcaaaaactgcactaggatatcaaaggtgtttgaagagatgggccttgctgcctaggagctgatagtctagtaaaggaacagatagtacaggtgataaggaactttggtatacaggatcttacaagaggtaagaaagtcactttcccataagtaatgtttcattcaaatttcgaaggacgttcaggaattaggcagtgatggtggatagaagggtggcagaatcagggagatcatcctgtacagagggagctgaagtaagacccacgagccccggtccgttcagtctgtttgggaagagcttgggtttttcagcggctcttaaggaatgggagatactgatacttctccagtaagactggagaagtatcaggacttaaagccaaaccttttgtaccatgttaaaatttttgcttttgctttaactagagtggcatgcctttgaagggttttattcaagggactgaaatcagataggtgtgttagattattctgcctgtttaatgggggttgtctttggaagccagggataggacacactgtaattgattagaaaaaataatgagggccccatttaaggcagtaggcatggtgagggaagagttgggtgtgagagacagtaaggagtgtgctcttagagtgcggtgattcgtgggggagtgatggatgatggggagagaggggaactgaatgagcagtggtaccattcacagaggtaaggtggaatagatactaaattcagttttggccatcttgaattgtcttaattctgactcttcatatatatgagttaaactgcttcctgggagggagttttgagcttttgtttttctggttcatctccatggaaaaggtcaaaggttatgagttaggttcttgaattttctggagaaaaaaaaatcatctttattatctacactttgaatatctgttctcagccagcagcactagtactgacttgagtgctcactaatagcctcaatgttgaattaggggctgggtctccgctcctttacagagtacttgaaataattgaggtttcagtttgatagtgtaagggacttgttcaccacttggtatctgcatctgtgcctgtattcttttgggggtgtttattttttcttctctctcttttttttttttttgaaaaacgctctaactaaaaaaaaaaatttaaccttgtaacaatacataaccaagaagataaaagtccttcattaccattattaacaagttactaacaagttggtgcacatgctgtgcagtcaagtcacgtatgacacacacagcgtggcatggggcttgagcagaatcagggtctccttatactattctcaaaggtttttttgatcacaatatcattttggtcagcacgtaaatcaagctctctttttaatagttgcatagtgttttgttgtgtagatatatcatactttatttacatagtttcctgtgtaactgtttaccatctacattttccagttctctaaaccagtgctgtccagttctctaaaccaaagtctgccaccagcgtttctgtgatgacggacacgttctatatctgctgtgtcctgtgtggtagccattagtcacatgtagctgttgagcacttgaaatgtgagtactgcatctaagggactgaatttttaatttcatttaattaattttaacttaaatcgccacaggtggcttagtggctgccttattgggcagcatagctctaaactattccagagtcaagtgagatcattaggctacttccttagaccacatactttggtcttcatcaattatagtttaatgattttctttgatgttgaacttctgtaagcctctcaaagaaatatattttgttgccagactcctttaaaggtctatattttgctgcttgagttttgttccaacagagaatttcttcttccagatctatcagtgtacttccctctagcaagtaaagggtatctgtcgaccttactgtgcatctccttttgtcttggttgcctagaagcccaaagttaatttttatttttattatttttgagacagggtcttattctgttgcccaggctggagtgcagtgtcctgatcacagctcactgcagccttgaattccagggttcaagtgattccccaacctcagtctcccaagtacccaggactacaggaatgtgccaccacacccagataattttcgtatgttttatagagatggagtctcaccatgttgtccaggctggtcttgaattcctgggctcaaacgatcctcctgctttgtcatcccaaagtgctgggattacaggcctgagccaccacatcccaaagttaaatttttgattgaattatagcagttggttttttttgcctctcaccaccacccctatcaaacttcatcactttcttttccttatgagtttaaagatttcgttatgtgtatggttttttttaaataaagctcttcatattctttttgcaggtgcttagattttacatgaagtcttttggatctatcctaaaacttcactaaaaaatgattagcagcggccaggcacagtgacgcacgcctgtaatcccagcactttgggaggccgaggcaggtggatcttttgagctcaggagttcgagaccagcctggccaacatggcaaaaccgtctctattaaaatacagaaaattcgcctggcattattgtgcatacctttggtcccagctactcaggaggctgaggcaggagcatcgcttgagcccaggaggtggaagtggcagtgaagtgagatcatgccactgcactccggcctgggtaatagagcaaaactctatctcaaaaacaacaacaacaacaaaaatcaacagtatatacacactgcttccctcccacagtcatgcacacccacatatacatcttagtgagattctaaatattatcacatgtttgtgggaatcctgtttattacctcagaggaaactatgcatacttaagactctacttaagtactgttgtggttgaccacattttattccactgagttcagattgagttcctttatgtcctttgctgtgtcagtatcatgctttctttccttcagctttatttgggggaacatatgggaaatcttattttgtatgaatttaaaatacgttcttcaggatttcctagttccgtgcatgaccgcctccccaagataatcagtaactgctaaatggtgttaatatattttttcaccttcctagaatagcactgttaaggtatagaaccttgaataaaagtgtacatataatttttttaaagttttgctcttcctttttttctgccgagtttccccccctgggtatttttacatatatcggtacccttagtttttacatagatttcaaaattaagaattagaaagcaataagaatatgcagaaaagttattaataaacacttttgcctgcaaggaagtcgagtagaaccaggaaactactgatgtgctaaggataacacaccaaaccatctgtgttactaactcttggcaggaataaaatgacaaaacaagatcttgggagatgctcattaccaggtgcatgatcaaaaagataaatacattctcatgtaaaaaaattggcgtagtgcctttagcatccttggggcatgtgtgcgtgtgcatgtgggcaagtttagcatttggtgtagttaggaaattgggagaggaaaagggtagaagtagaggactttaacattgcttagagtcattgttattgcaaagtctggaagtgaactctaggaaactgcactggaattcaagtgtaatatgatgataaacatcaaatgactgtttgtagccgaggtgcaaggccaggctcttcaggaaagaatgaataggagaccttaaaataaacatctgtttttttattcagctaacagtggactttgaagaagattggggccatgttcagattttctttttcttccttgagaattgaagaaaaatgtcagctgaggattttttttatgctatttaacatgtcatttgtagtgtttcatgaaaagcagacagatatgtaaagctttttattccacttcaaattagaataataagttagatccagttttgaatttaaaagagaactttaacagatatgttttatgagtgagtttcatgattttgaataaaattttcacacacttaaactacagtggtttggccaggtacggtggccacaactgtactcccattgctttggtaggccaaggtgggaggatcatttgagcccaggagttcaagaccagcctgggcaacatagtgagaccccgtctctacaaaataaaataaattagctaggcatgggtacatgtctgtagtcccagctactcaggaggctgaggcaggaggataacttaagcccaggtgatcaaggctgcagtgagctatgatcatgccactgtactccagcctgggtgacagaacaagactctgtctcataaatacatacatacatacatacctacatacatactacagtggttcatttgaaagtaattctgtatgtcctgttcctaaatgttttaggaatatctggttttcaccaagcttgcatgttctgaatcctgcttaagttcaacgtttataaacctccattaggtatgtgaatttagttttcagcaaattattcctttggtttcccagaagcttccttcacattccagctcctcaagtaaatgttaaaagtttaacaaggaaaaggagtgaattgattttgtatatatttttgtttggtgaaatagcagagtgtaggcatggtcttttcagataagtttgctaaaaagtagtttcctgtcacctccctttgaaaagaactgaggtgtgccccatcctcaaacctaccatctttccaatttatttgtttattggagtagtaggtgggaataaatgtttcttagatttttctggcctcccttcctaagccagggtagctcctggcaaatagtccccagacaaaccttaactgggccgccttcctggaacctcattttatacccaaaatacaaaaaaataaaaatacaaaaataggaaaacacatgaagataaagtgctgcaaacacacgactttgcagatattaatcatacagagccaatcgcttatggtatagaaatagtctgaagtattcttttggcacagcattgcctgtgtgattttcgccagaaaggtttaactggatctgattatgagcagtgatcagcagaggactgtggggaacccctgcaaatcagggctctttctaagagctctggcctgagccttgagcagatgtccacatcctgaaagtcagtgaaggtgggggctcctacattaaaggaaactaaggagacataataacctccttaattcattttttttttttaaaaaacagctttttaaagacataatacacataccatgaagtttatccttttaaagtgtatagtcctaagccaggctctgtggtacccacccataatcccagctattcgggaggctgaggtgagaggatcgcttgagcccaggagtttgtgaccagcctgggtaacatagtgagaccccatctcaaataaaaaagaaaaaaaaaaaacatgaagtgtacagtccagagttgtgcagtggttgccactaattccatgacgttgtgtcacactaaccagaaaccccatgccagtttttcttccttctcctccctctcccagcccctgcaaccactcacctgctttctgtctatgcatttgccttttctggacattcgtgtacagtacgtggtctgttttttcttcagcatgtttcccggcccgtccatgttgtaccatgtctcagtactttattccttttgattgctgagtgacattccattgtgtggatattatcacatttgttcacccattcatcagtggatgaatgtcgttatccagtttttactaagtccagtgtttggacttagtgaagtagctagtctcttaaagatgagttctctggcaactttccccctcccttcatatggaccctgcttttcttgtttctttgtgtgtcctgtaatttttttgttggaagctggatgctttaaataacataatttaggaattatggaactcagtccctcccccaggtccccagggtttgtggttgtttgtttagtgactgtcctggactaattctataaaatctgatttctttctaacgtgtggccactgaagtctctgctcgttgccgaactgtcagctaatgaataaacagagatttccttcaatgcccggaaccagtcggtcgcccagcctctgccagagtgatcctcatgaatgcccctgctcaccattgctctctctattcaagccacactgggctggtctttttactgatccacaaacatgccaagcaattccaacctctaggcctttgtagttgtcaggtagtcttgagggtcactccctcctgccccttgggtccctgtccatcatctccccttcccctctattcttcattgccttctctccttcagtttccacagcaccagtctctgtctgtcatactctccactgcctctcccttgtttgtagtttcccctttctggaaggtaagctccttgagggtggggattgttctgtgttttgtttactgagtatctagagagaagggaaagtgcccgcctctttgttgaataagtgaatggggaggtaactctttgttgaataagtgaatggggaggtaactctttgttgaataagtgaatggggagggagcttaggcaacctgttcttatttaagaatgagggccagacgtggtgtctcactcctgtaatcccagcactttgggaggccgaggccagtggatcactatagctcaggagttcaagaccagcctgggcaacatggcgaaactacatctctacaaaagatacaaaaattagctgggcatggtggcacacacctgtagtcccagctacttgaagggctgaggtgggaggattgcttgaacctgggaggttgaggtggcggtgagctgagatcgcaccactgcactctagtctgggtgataaagtgagaccctgtttcaaaaaaacaaaaaaaatgaagaatgacgtgctaaaatgccagctggggccagacatggtggctcatgcctgtactcccagcactttgggaggccaaggcgggcggatcacctgaggccaggaatttgagaatagcctggccaacatggtgaaaccccgtctctactaaaaatacaaaaattagccaggcgtagtggcacacgcctgtaatcccagctacttggcaggctgaggcacaagaatccaggaggcagaggttgcagtgagccgagatcgcaccactgcactccaacctgggtgacagagcaagactctgcctcaaaaaaaaaaaaaaaaaaaaatgcagggtggtgttgtccactggtagttttcatgtggacccttcagctaatgactctacccagatatcaatatcttaaagtctgtcttctgggacctttcatttactccagagaagaatcccccagttttgttctgaggtgttaggggtttgggctggtagagtggacgcacagcagcataggcttgactttggcattccaggggctgggaaaaggaggcgagggtcccacagtttgatgtctagactgccattaattgtcctgactttagccccacagctcaagtcacctgtgcctggtggcatactccccacccaccccgcacatagggcagctttggttcccctcctccagagaattatcttctggtctctttaggcatggtggggatttgggtgttcatcagctccattgttccccctttattcgggcctgtgcctcatcctgtcgtcccccatgcttagagccttgaagttcttgtcccaaggattctgagagaggaatcttttctctttgctgttcacctctgtaagctctcatgtttacccggttaagtttcttaaactactgcatcttcttcttcagttctttttgtccttaaaggttaataccttttaaaatttatttactgtcattttaaaaaggcttgacagcgatgggggtaccactattaaccaaaagctctctgtgtttcttaacatcagttttaatttggtgtttaaatgtttgcttggggcgtcctgtctccgctagcccttgattgaaggcactctgtcatgcgtatctctactcatagtgtcatatagattgactattgcttgatgggctattagtgagatagtggcttaaggaatcttaacaatttttttttaacttggccttatttttcttgttatttcatttcagtccctaaattatcttttcaaatattaagtcatggcaggtaatagtttttcttttttaaaaataaatcttttaaaatgttgaaattaaattgcttctttgctaatctgatttttaagaacaaaacactacaagtagagtacatttaaatgactcataattactcacacaaatgcatgtaaacttggatatgcaattaggcagctcattatgctgcaaatgcaattacatgcttaaggtcatggccactccctctggctcacccagtgttctcttgggtttatgatcatttattaagcctcagctgtcagaatttgaaaatacatgctgctgctcctagtgaggcctttccaacaataatggaagaaaagctggaaaagaaaattttcttttgagtttatatgcagagttggttttcttaattggcaaaatcccattttcccacaggagatgcaggctaggtaattagaaaaattatcattaatcataatagtggtcagtgatatttatagtatatctatatttagtatatatttaccatatgtagctatgtatagtgtgtatatacattatagtacaactccatcatctcttatctgcaattctgaaatttaaaaagccttgaaagtttgtttataaccctgtggtgaaccctgactggacctgatttattaggacttcaacctatgtgaaataatgaatttctttgtaggtctgtgtttatcccaaatcactggtatgaatttgtgtaggttttgctgcagagatgttaatatggtttgatcatgggccactgacccagaccttactgaagtttttttgttatatacagcatacatactgtattacttttttaaaatgcaaaaagttatttgtttcaaactctggttccagttgtttctgttaaaaaaccagggcctcactgcagtgagctatggtcataccactgcactccagcctgggcaacagcaagatcctgtttcccaaaaagaatcatggcctcacagtaagggtaacagatttctggttagacctggatttaaattctaatagcgggctgggcactctggctcatgtctataatcccagcactttaggaggccgaggtgagcggatcacccgaggtcaggagttcaataccagcctggccaacgtggtgaaacactgtctctactaaaaatacaaaaattagctgggtgtggtagtgcatgcctgtagtcccagctactagggagtctgaggcaggagaatcacttgaacccgggaggcggaggttgcagtgagctgagatcgtggcactgcacttcagcctgggtgacagagtgagactccttctaaaaaaaaaaaaaattctaatgggggataaaaaccctctacctcttagagtgtgggttgctagtgctattattatttttattgttgttattgtttttattattgttccagttccagaactgatatttatatctatttttagagtgtcctgaaaacagttctataataaaataactagatacttgatatggttgttaggtggtaaaaaaaacttttatattcaaactccctgttgctgttagtaaatgtagttcttacctgcttgatttaatagtgtcattataacataaaagtttaaattgaatttctaggattgtaatagtataagatcactaaaaggtaaaaatgacaattcttttaactaaacatcttctgtgtaatcagtgaaatatattaattttatgtagcactacattctaactatttagtgtggcagttaagctttcctggttatgaaaccatagcctctcagttgttcagggccttgctcaagtgccccttgcaaagctatcttgatcggcctcagcagataaagggcttcctagaaccttttaaaaatttcttttttggcactaatcccattgtattgtacttgattgttttccacttacttatgtttgactttagcacttaacttttaccaaatgctcagttaactttttgaatgaatgaatgaagttgaagaaattaagaataatttagtccttccacataagtattgctgtatttgaaacaactctgttccttttgggtttcattctactatttttatagggtatactatacttggaacataataaatatggaatttaataaatatgtgatgaataaaaattgaattaaaatctatttcattacatttcatggtttcagttttattcctgaaattaaaataatttacttaggtcctttttccatgtgattctttttctttctcttcttgtcttctctggtcttctttctcttttttttttttttaacagggtcttattctgttgcccaggctggaatgcagtggcgtgatcatggctcaggtgatcctcccatctcagcctcaggaatagctgggaccacaggcacatgccaccatacctggttaattttttaatatttttaaaaaatatataaaaaatgtgtagagacaaggcctcactacattgcccaggcttgtaaaagaatatttctaggctgggcgctcttgaaattccagcactttgggaggccaagatgggcagatcacctgaggtcaggagttcaagaccagcctggccaacatggtgaaaccccgtctctactaaaaatacaaaaatttagctggttgtggtggtgagtgcctgtaatcccagctactcaggaggctgaggtatgagaatcgcttgaacctgggaggcagaggttgcagtgagcctaaatcacgccactgtactccagcctgggatacagatggagactgtgtctcaaagaaaaaaaataatatttctaaaaaaagataatttcaaatttaatggctgttctatgttatcaattattttcttatttgttccattaatagtacgttagataatgaaaggctttgtcatactcagtagcattataagtaagcagaaaaaaatgatggcatttgtattggtttagtagactttggttctttgtctataatattaatagtactttgttgtggttttaatcacccttgatctgttaaaaccatttatctggtaatcttcagtctttttttctgtctcagcacagctttgggatgtagcacagtgatttttctaaagtagagtgagggaaggagtatcttctttcagctccctaagagtatttattttatttttatttttattgttcttagagacagggtctcactctgttgcccaggctggagggcagtggcaccatcatagctcactgcagcctccaaatcctgggcttaagggatcctcctatctcaccctcctgggataatatttgggactacaggtacatgccatcatgcccagctaattttaacagtctgtttttgtttttgtttttgttttgttttgtttttttaagcagggaagcagggtctaattctgtcacccaggctggagtacagtgacacagtcttggctcactgcaacctccacctcccgggttcaagcgattctcatgcctcagcctcctgagtagctgggatacaggcatgcgccaccacgcctggctaatttttgtatttatagtagagatggggttccactgtgttggccaggctggtctcgaactcctgacctcaggcgatccgcccacctcagcctcccaaagtgctgggattacaggtgtgagccactgtgcctggccaacaatatgtatttttgtagagataggatctcactgtgttgcccaggctgccttgaactcctgggctcaggaagtcctcttgccttggccttccaaagtgctgagattaggcgtgagccattgcacctggcccctaagatttttagtgttcaccctttttcctccccacttgtagtgctttacaggaatacatgataattttgagttttataattaacatcttaaagacaaattgtaatcatagaagcagtgatcatcttgggcacatggcatgtattttcatgtcctttaaaattggttcttccgctcaagtagattggcacaagcagatactttgctgcatttgagttgtagccttcttgtagcatgttggtacataaagattcatattttatagaatcaagtatttccatttagattggttgatatgattatcattaaagttgctaagggagccacattatccctttctagcaatctgatgaatcagttttcaattttctacttttattactactgacctgtgagttgaagaaatatttgctgggcgcagtaccactgcctgtaattctgtctattctggaggctctcaagagtttcaagaccagcctaggcaacacagcaagaacctgtctctaaaaaaataaaaagaaaaaaagaaagtcttataaattgaccacagcatgggcaacatggtgtgactgaagcatagagtacagcaatgtaacagcaggacagaaaacctggaaagtttgaggtagtagtgatagtccatatatggctaaaaaggatgttttcctcaagttgtaaaatgtggaatttagaaagtaaattaatatatttcaaaggattagttgaggtttaacatattttatggctatgaaggcaataaagacattttacacattgacgctgtgatgtagctacatcagagagtgtgacgtgcctgtggttgagccctccttattggctaagctggccactgtttttgaaacttaatggtaggcctctgacgaaaggtctaatgtggataaaacctgcattttataccagtgtaaatcaataatttcaactttgttatggtggttttgatgttttttctctgaaaaggaactcaggaaatgtgattaataaggtcaactgctagatttaattttgtttttgatggaaatattttttcctagaaaatttaatggccatgaatctgattgcagagattatttaccataactagacctgtcccctgacaggcaatttaaaccacttccattaaaatctagataatcagaaagaatgttgtggaacattataaaagagggctatgtgaaagtcaattcacatctagactgttttagtattcctgccttcacctttgaaagtcagtgcacacagtataatctttttgttgtctttgaagcccatgtttatgattgatttaaaaaggtggaacaatttactttgaggttctttgggtaacagtgtacccttgtataggaatcaagatagatctaactttcaccagaagtattcatatacccagtagctttatggtgaggtatttgagtgtttttgtctgaataaggaatattagaccaatttagaaatacttttgccggagaggaccctttcagttttagtacttgatgcatatgaaattcatatgtgttttatacatgaatagatttatttatcacatagttattgagcacctactatttggcaggcactgttctaggtactaaaaattcagcagttaacaaaacagatgtctctcctcagaggacaatatcttggatattatattctaaaaaagcaataatagcatactttgatctcgtctagaaaagaaaagattgctgttttagggagtacaccattatctgatagagctttgcatttgcaggtttatgactcactggaagcagatacccctgtagttacaagggcctcaactctctcggcttcagaagatgcctgtgattttcctagcttgctcatgtgctccttccgacatgaagtcctttctttttttttgagtcagagtctcgctctgtcgcccaggctggagtgcagtggcgtgatcttggctcactgcaagctctgcctccaggattcatgccattctcctgcctcagcctcccgagtaactgggactacaggcatccgccaccgcgcctgatttttttttttttttttttttttgtatttttagtacagacagggtttcaccttgttagccaggatggtctcaatctcctgacctcgtgatcctcccgcctcggcctcccaaagtgctgggattacaggcgtgagccaccgcgcccggccatgaagtcctttcaaatagacttaattcggtgtcccagccttccctagtttttttttaagccatcttccccttggactcagtgcagtctgagttcattgcacacacattgtgtgtgtatgtgcgtgtgtgtggacatgcaagtgcacacatgtgcttcagctggattttaaacttcttcagggagattgtggtcagtgtctttaatttagcacagtgctttgtatgtggtagcatttagttgttgacttcaagctactgtcctaaaattgcttaaaaccatagcagttcttttaaaaagtgttctatatggaattttttaaaaatgccttgcatttcttgaaggtttgtcttttatggttggagtcaaaccacttagtatataaaaacctttacttctatttttaaaaattgtagattgcactaatatgaagtttctgtggaagactatatatgctcgagttattttcatgtttatgagtaccatagctgtgttgaggtgaagagaatcactctttctaatccggcaaaataatgtcactaaattattatggccatatctaacatttacttttctttttatttgaagagggtgttaacaggggctgtttttctttgttataactctcttccttctgcctttccttcttcagaaagtttaagctagatttaataatttccattatgatttctgggtttttttccagtatgcttgattgctactgaaataaacaggttaagtcgtcactggaagttccattttgcccgagtccagtgttctctcattggaatacctctagcttaagggaggatttcgctagcatgtcttctctgttgactgagccaaggtttcctttggcatacattgacctcagcgggtgtggcattttgttgggaaagatttgtatcaatagcaaaaatgtacaaagtgatcatagtattttatgaaagtaggtggattatattttttcatagttggattacaaacttaatgattcatattttattagttggttataattctgttcagccttttgttcctcagcctttcattgggataactcgtggagcctggtcacccatttagttttgaagaattatttatacagaaatttaaaaaatcaactaattatttttaaatggcaagtaaaaattatatgtatttgttgtgtaccgcatgatgttttgaaacatgtatatgttgtggaatggctaaattgagctaattaacatttgcatcacctcacgtagtacttaccattttttgtaatgagatcatttaaaatctactctcttagcgattttcaagaatacaatatattgccattaactatagtctagaattttagtttttaatgagttaaatgaattaaatgaagtggaccatgcagaatggaatgtaattgtcaagtaattagttgaaaaatcttaaaagaaagtaattttgggccgagtgtggtggctgagcctggcagattgcttgaactcaggagttcaagaccaacctgggcaacatggcaaaaccctatctctacaaaataataataataataataataataataataataaaaaatattgttttttaaaaaggtaatttttcttttagacttttgtttggcaaacttaaaaaatctagtgtaccaaataatgcttttgtagaattctagtagtattttgaaggaaggaggtgatacatgaatggatggatgttattataagtatctgaattatttatctgtactttgatagtgctaatataagaacattcattcatacttttgtaccttagactaagtgaggttgttttctcttacaagcctaaacatttaccactttgtttattctcttctgttatatacttgttcattatacatactgcatccatttgtcaatacttctgatagaaaaaaggatttagaaatcatgtttaacaaaatctggttataaataactgagacttggatggcgtggtaaactgtgcctttgctgaccttctcataaacaccaacaggttttgggtcctgctcctcggtggtgttccttcttagacaacttgaccgaagaattagaagagaatccagaaagcacagtctatgatgattataaatttgtcaccaagaaagaccttgaaaatttaggtaaaaaaaaaattgtgatgaaatattatgtaattacttcatttctactttttttttgagttttcaacatgagaattggctgagccatgtttacctcatctcccaaatcttccctttctgccaaatcagatattaaacatattataaattgtcagatttgtaacctttctccttagagaaaagttcaagtaaatttaacatgctgaagcttttttgtattttaaatgagaatttattttagcaaataatttcttttagcatactagctattatagaggaaaaaaattgtcacgaaagcagtgatttttttttcaccagtattatctgaagtataataaggttttgaaaatgtctcagagacggcaagtaaatgattcctgcctcccttttaggtttgattataaaagacccaatccaaaacttagaagtgatacattgaaacttcagatgtagaagaaccttaatagttactttatgtttgaaggtcacaagccaagaagtgtcttaaaagaacagcaaatacttatgagatagggcttactatgtgcagatagtatttttttttttttttttttttgagacagagtcttgctgtgtcacccaggctgcagtgcagtggcccaatcttgtctgattgcaacctccgcttcctaggctaaagtcattctcctacctcaacctcccgagtagctgggattacagatgtgcactgccatgcagcatggtaagacggggtttcaccatgttggccgggctggtcttgaactcctggcctcaggtgatccacccacctcagcctctcaaagtactgggattacaggtgcgagccaccacgcccagtctgtgcaggcagtattctaagcgttctacatgtaactcatttaatcttcacatccctatggattgggtactattatgattccattagataaggaaactgaggcaaaaaaaaaagataaatgtacgttgccagaagtttcagttgtagtaaacttgagagttgagctttaaatccaagagtccgtgccctttccccagccatcccagcccctgcaggacatgttgcgcctgcttgcctagccctcctctaggttagagtagatggtgctcatcttgttctgctgctgtcagagggctacagcagaagttactgagagtgggaaaacttagaggatccattctatacaaggcaaggcaacttagttgtctttggaacaaatagatgtgcaacaacagttgagtattaaaacagaatcatgttaccattagattaattaaacttcctttttaacccatatctcatagcacagttaatccaggcggaattactttctgtcagttactaccaaaaaagagctgaatttagccttttaaaaaatgacttgaatgaaataggaccttcttactgcagtgccttcttaagtgtctccaacgtagttttcataatatgctgtcacactcacctacattcttaaatcgaatgaaaaaaggtcattgttcttttatggattttttaaaaactactatgtttagtacattttgggttctttttcagtttctttactgggtttattttgggtgaaaaaagcagttatataagtttaggtatattttgttaaaaagtaattgtactgctcatttttaaaactatagaaatagatattcaacaaaatgacagtcatactagaaagcattttatgtatattactaatatcttttgatgtcaaatgagcttttatcatttccccataatatataaaaccttctaaatagaatatcttaagagtagaagtaagtaatgaacttcccttacttcctaagattatttttagcgcagcattagtatattgaagatttgcaagttctgactcttctggatatggccaacagcagatcttatagcttggtatttcccacagtgcgttctttggaaaattacgtctgtaaaaaggactgggtggatagcatagtggctgatattgtgggcactacaggtagactgatatgggtttacatcccacctttctcacttaatatctgcacaacttggccaattcacttcgcctctttaagccttggtttcctcatatgtaaaatgggaataatattggtcccaacccatggggttgcctggagaatgaatcagaaaatgcttggaaaatattcagcaccctgttattttaggagatttgtggcaaataagtttgggaaatgctaggttaagcacagttaaatcaatttctttacctcgcatacttcttagagcctttaataccatcatacattgtaaatctccaaacggaaggaaagtatgaaacatttcccaaacttacttgaccatggagcccttttttctcagaagatctcttgggactaatgatccatggagttaactgtaggaaatgctgctgcatccggttctcgggttaggattgtttcgctatgaaaagcgcttcacttggtttttatttatgacctgacttggattaattctgtgacattaataaaggaaacaaaaaattacttttgcaatcactggtatatgtattttataatgtagtggttaatcagacccttatcctgaggaagatttagagaatatacacgtgcagttgtatacattcacgtttcattaaggctcagccctcttttgttaggactccattgtgaaagtgcaaaccccatagttttattaacctaatgaattctatgacagtattttcctaatcaagttttagaattccgttatgagaatatcctaaatttaattttcttttttatattgttctataacatatactattttatactactgtatgattttgctcagtacttgattttcaggtctagatggatgtatatttctaaaatttggaaattagagtaatgctttccttagaaagacagtcacttataccaggggtccccaacccctgggccatggacccataccagttggtgggtggcctatgaggaaccaggccacacagcaggaggcgagtggtaagtgaccatgactgcctgagctccgcctcctggcagccgtggcatttgattctcataggagcgtgaaactagtgtgaactgcacatgcgagggatctaggttgtgggctccttgtgagaatctaatgcctgatgatctgagatggaatagtttcgtcctgaaaccgtccctccctgcatccgtggaaaaattgtcttctacaaaaccagtccctggtgccaaaaaggttggggaccactgacatatatcataaatgttctgcatgtgagtacatcacatgtggacttattttgaagatctcaatctttttctgtgtcaatatttggaattaataaataattcctgtgacatagagcattcttatgtgaccaccagcaccacaaattctaagtgtaacctattaaaactgggaaactctgtgaaagtattgtttgaggcagggttctcaaatgctgactggcagtggacttttcattagtccctgatgaggagtgcatatgtgatatgagtattaatatgcatgtatgtatgtttatatatggtggtaggaatttgtcagctgttctttcttggaagacggttctttctacgttgtgtttgtgagtgtcctttgtctttgcaaatggtcgatgacaatgtttctcctgtctcccttctcctcatttcaatttggcaacttactgttgatccccagtattattttctaaattgaacttgtttgtggaaataaaaaatctgaggaccactcagagggcataagggaaccctctttgtcttagttcataaggactttctcatcatttttgtgtgtagtattattacatttaaaataaggatgatattgctgaagtagattaaatgttctctatagatatcaaagaagattagtaattctaatccttaaatttttagtctgaagtgaaatcttactataatcaaattgttgcccaagaaaaactgttgaatgttaatgaagattgcataaggacctgctgtcttctgtttgacctttcccagggctcacccacctcattggatctcctttcctccgggcatatatgcatgggtttttcatggatataagactctatcacaaggtaaacagaaaattacagttattatgtttcaggtaactaatgcgcagtctatggccatttcctcactactcgcactttcataaatcatacataggatttgtaggggatctgcctgttctttggcataactgtcgtggtgtatatgaaaatgatattaccaaataccattcttttattttaaaaacttttttcattttgaaaaggtgaaactgatggtaaatccatttgcttatgaagaatataggaaagataaaatacgacagaaaatagaagaaacacgtgcacagagagtccagttaaaggtaaatattatacttaccattgaatttatcagagaagagtacttaatttccattttgtgtattattccaaagaaatctgccattcttttcttgattttccatctttaatttgcatcttttactgatatttttggtatagtttgtttgtcatcagtgtgtcatgtttgtcatgagggtgcaaaactctttacaattttcgcattatgacctctgcggtaattgtactgtgggacataatgctagaatgattgatattgtcacctccactagaaacctgatagcatttttaaatgggttttccatttttggagtatccgggctttgctaatccctattccttactgacctttggccgtatcttaggctctgtttggatcatgggaaatggtcgacagtcgtaaactgcactcgctgtctgagtacatagaatttaatgtaaagaatgattaacttggtattggagaactgaaaagacagaactgctaaaggatggaggagagaggtaaactgcaggaagcagccaccaactcagagctgcggaacagcctggggaataggaagaggaggccccgtggagctggacccaggcctctgaggaggggccacaggccggttccagggcccttgaggcataatagcaaggatgttcctgggagcgttggaaactgcaaactggaatccaccactgctgtggaaccagctgttgtttccaggacaaagagttgctgttgtgtgatgccagtgtagacagagaagggcaggccctgctcctgcacctgccttgcagtctgtctgcagccgcccctgttggttcatttcaaccaccaaatgataccaatgtgtataactgaatgttggtatacgtacatactctgtcactataaaagactagtgactgttttctgcatttaccctcagtacttttttgtttttccagactgttaaaagatttctggtgtatttttgagacaggatcttgctttgttgcccatggtggagtacagtggcatgatcagagctcactgcagcctcgacctgagctcaagtgatcttcccacctcagcctcccaagtagctagggactataggcgcacactaccacactcaactaattttttgtagttttagtagagacagaattttgccgtgttgcccaggctggtctttaacttcagggctaaagtgagcctcccatcggcttcccaaagtgctgggattacagtcatgagccattgcgctgcctctcagtgcactggaaagaggctctcagtgccctgggaagagaaatgagggcgagttccctagcagtaagctggggttgccgtttttttgccatgtggcccacctggtatcatcacctgtctacatttcctactatgaggataatgaaatttttaaaatacgaattagttggctgggcgtggtggctcatgcctgtaatcccagcactttgggaaggcccaggcaggcggatcacgaggtcaggagatcgagactgtcctggctgacacagtgaaaccccgtctctactaaaaatacaaaaaattagccggatgttgtggcgggtgcctgtggtcccagctactcgggaggctgagacaggagaatggcatgaacccgggaggcggaggttgcagtgagctgagattgcgcccctgcactccatcctgggtgacagagcgagactccatctcaaaaaaaaaataataaaataagaattagttatctcctatttatgaaattatacttacacaactgttcacctttaagctaatatgtaaatatgttagcttttaaaataaaataaaataccagcttttattttctctctagaaattgccaaaagttaacaaagagctggcacttaaattaattgaggaagaagaggagaagcagaaatctacatggaaaaagaaagttaaggtaaggtgaaaaagtatcggcaaattgtttctgcgttttgttgatagtaacttacatcttttttattgtttctttttactttaaaaatacatgtaggactttttctttcctgcgtataagattagtatatgcttaagatgggaagtctggaaaatagaaaagaatatcaagaagaaagctatccttacgattcttataccagagaaaggcatcattaatatttcagtgaattttcttcctgtcttgtttcaaaattagaaactacaatagcaagagtcttgtatgtgtaaaatgtttatcctgattctttaaaataacacaggtggtttcccattttgttaaaaattctttgtaaatatttttaatggctacatattctgttttatgaagtgattataatttactcaatccttctattgttaaacgtttagattattgtttttctttgttcataactccagaagtaactgatttttatttagacttggtgttcttacgagtatgcaggctgaagtgtaacttccacctgctttcctttattaatgtgaaaatagacaaagatcagtcataagataaataaaagttagcactttgtttagttggtattgtccagaggtgagatttttctagtgttttcagatgtatgaaggtacctgggtccttgccaatcttgttttctctgcttagatgaggcaggcagatagccaagcttggttatgtgctggaatgagttggaaagaactgatctctgcgacagcctgcagaacctaatgagtaaggagctgaccttgtagttttgggccagctgtgtggtgccctcaggaggttctttttttttttaagcttattctttctctgtcctctggtttttaaccaggtacatgcatctaagatgggtgagctccttttgtcttcatttctgttcatgctcttcaatacccagggactgcaactgaagggtcttgttcctagctcctggcacactgcttatgtaatcttgggcgattgctcatcttcatggggtcacagctttttcatctgtaacatgcaaggaccggatatgggcattcttagagctgtgctttccaaatggattcagactcaagactcccccttgctgtctcctgcttccttagtctttccctgcatcccctcatcctcgtttattacattcctttagtatattgtttaaattttaatttctggaagcctctcaagtaaatagaggacttttaggtttccattttcatgacatgaatagtatgccaatgttgaaataattcctcaaacttattaatatttgaatttatgtctgtgtgtaatagctctgcaccttcctaagttacaccaatgtgtataaatgaatatatatatctttaagtatttagaatacaagtctttgctgctgtgttgactctctcctcagagtattcacactgatcttcttgttagctaagcctaagcatgattagggaggtaacttttctgctttgtaatgtcattttacagtaaaagctaaatggaagtgatctttggatgtacatgccatgccctaaggcttcagtagatagagagtagagctaacttagactgtagatgtttgcattcctatctgtgttttatgccagagtctttatcatctgatagaggcaagaatacttaagttacaatttaattttgctactttgtgcagcatgctataccagagcctgtttataaggccctgtgattatctagatgcagaagtgcccttcccttcccccccatttctttgtagacctttgctgaggttgagggcagccagagaagatttagaataccccatagtgcaggatggtggaaatgacttcacaagttgaacacatgcagagcaatcctcatggtcaggagggaaaattagcattgttccatgcctttaaacatttttgacaaaacattaaaaactctcttactgtccattataaattggaaaactaggatcttttcattatattgtaatttaagacattaggaataaagcctaattgagtattttattttctttgttttcttttatttcttttgtcaatagtacttggaacagtgcttacttttttctcctcctaaacttttgatacggagccagcatttttctttgcctcagcaaattgtcatactcactttctaagtttggataagcttccgatgtttcatcctttgctcttttgacgttatgaattgtctctgagagttcctttcatgtaaagttttttgccagtgtcacttccactgggacacttttcttcttcttgtcacaactgttttcctcatttgttttcagaggttcaccattacgtggtcccctcactacagacttagagtgccagccagtgacagtagccacattccctgtattcccacagccagctctttcttctgtaactccctttaaatttgattcacatttttgttgttgcagttttatcttgttgattagttctctgtaaattattcttttttgtaaatgtcacacgagtttgtcttcggtatctaaagaagcaatgcaacagttatacacgcgtcctgtctgcaggaactgaacaggaaattcacggtgcatcacaccgcctgatgcagtgtccggtcactgacaggctttgagaaaagcaacccattatttacgtagggatttgtggactaaagagctcgctgtggagttatactttatgaacatactcagttgatgaacagagataactgaaatttgaaccgtcttgttggggcacctggtattctttaactgcattccttagctactccttccttttggcaccgtgcgaatcaagaacttgcctttctgttatctccagtcacatctacgttccgttgatgttcactcattttgttgctacatattctctaattaactatcaggatggcatttgattattttaaaacctattggtgggtcaccctgtaaagatttaccaagctgtgtaccattttacttccagtgaaaaggaggaagaaccttagaaattcctatcttcttccatcaaacagcagtttctcttcagctcttcatagctggaaatgtgatctttgtagccatatcacgtgataacagaattcttccaaagagtactatttgtaaaatgtgcccctaatcttcttgttggtgacttcctagcccaaatcagacctattatcagagctcagtttcattccagaaatatttatatatggtcttttgaaaatctgaggctgtgcttggaaaaagtttgtataatttgttgttgaacagtttcatcttatgtaaagtgaagatcgtagaaatcactcatgaattaaggaaagaatccttcattataatttaaaagactacttgaaagaattgctaagtctcatcagcagatcattagtctcgcctttgaactcagctcctcaaaagcttgagaactttactagctgtgatacctcctgatttgaaagtaggtatcttgcaataccaatttgaaaggtatgttttgccttgtctgcagctgaaatttattggagacagtgaaatgtgttcccaaatattgctgccactgagaacacaaaaatcgaataagatgtttactgtatggttgatattgaacctaaaatgggaagtggcccaccacataatgtcaatcagtattatatggacattatccaaactcagaaattttggttgcattaattctagttaacaattaaggccgagtgcagtggctcacgcctgtattcccaatactttgggtggctgaggcaggaagattacttgagcccaggagttggagtctgcagtgagccatgatcacaccactgtactgcagcctgggctacagggcaagacagcatctctttaaaaaaaaaaatgaatgaatgtatttattctttcaacaaatatgtattgaatttccagtatgcacaaacagctttgagaggcatgggcatctgtgatctgtttgatttgtgagggtttgagttttggttagagctatttttcctataggtatcattttttgtatgttagtcttttttgtcagtttcttgctgtggccttaaagtctctgatgaatgtacttttctttcattctgcagcagctcaggcaggactgtgcatgagatctctaggccaggggtctccaacccccaggccatggtactggtctggggccttttaggaatcaggccgcacaccaggaggtgaacctcaagcttcatctgtatttacagccactccccattgctcacattactgcctgagccccacctcctgtcaggtcagtggccacattagattctcataggagcatgaaccctattgtgaactgcgcatgcgagggatctaggttgcgagctccttatgagaatctaatgcctgatgatctgtcactgtctctcattagcccccgatgggacattctagttgcaggaaaacaagctcaaggctcccgctgattttatattatggcgagttgtataattatttcattattattacagtgtaataataatagaaataaagtgcacaataaatgtaatgcgcttgaatcatcccaaaactccctcgcgcccgccccccgccccccaccaccatctgtggaaaacttgtcttccgaaactagtccctggtgccaaaaaggttgaggatcactgttctaggctatgtgtattctgtggttaggaacccatggaagagatattttagcagtttcaggaattactaaataccactgagaacttatattaaagtaatacctcatctctctagggaatacaattaggtacagatactttgggttggatcaggtcagttttaacatccaaaatattatttttaaagcttttttagtatcaattaaaatttttgttttttttaaattacagttatacatgcatagttttaaaaactaaacatttcagtctgggcacagtgcctaacacaaacattatgggctcacacctgtaatcccagcacttcgggaggccaaggcaggcagatcacttgaggccaggagtttgagaccactctggccaacacagtgaaaccccatttctactaaaaatagaaaaactagttgggtgtggtggtgcgtacctgtaatcccagctacttgggaggctgaggcaggagaattgcttgaacctgggaggcagaggttgcagtgagccaagatcacgccattgcactctagcctgggcaacagagcaagactccatctcaaaaaacaaacaaacaaacaaaaacaaaacaaaacaaaaaaacatttctgtaatcccatcattttgggaggccaaggcagggaggatcacttgagcccaggagttcaagaccagcctgggcaacatggtgaaaccgcatctctacaaaacattagctgggtgtagtggtgcatgcctgtggtcccagctactcaggaggctgaggtgggaggatctccctgcaaggccgcagttagccatggttgtgccactgcactccagcccagtaacagagtgagactctgtcaaaaacaaaaacaaaaaaaacctaaacatttctccaaggtttgttaggaatgtaggccatcccattgtctgccccttttcctccctctgccttcctccattttcacctcttctcagacaaccacttttgccttttttgctgattattttggtataaatctctctctctctctctctctctctctctctctctgccccctccccctccctccctcttgcctgtagtcctacctcttaactttttagtgttaggcattatcttttgataactttcctttccaaggaagctatattgtgattttgattaagttggtattcagcattacattgttgtacttttgttttttgagatagagcctgttacccaggctggagtacagtggcagaatcatagcttactgcagcctcagtctctcgggcttaagtgatcctctcacctcagcctctcaagtagctgggattacaggtgcacaccacacccagctaatatatatgtatgtatatattttagtagagctgaggtctcactgtgttgtccgggctggtctccaactcctgagctcaagagatcctcccacctcagcctcccaaagtgttgggattacaggcacgagccaccatgcctggcctacgtaagtgctatttccagccgagtcagtagtaatctgtgactgcatttcttgttcaatctttgtgtcctttgaagttaataattgtctctcttgctcgttttctatgtagttatcactaatcaacacccaattctatgtcagttctctaagtcttattttgaggtgtttagataggttagacttatgcttatttaccttcctgaagaagttgcttctagaattttctgccccattccattctagcctggtcaccttctaatcccgggacctccctttaccattatcctggggattcacttcacctcagcccatgttggacagagaattacaagaaccttcagtttcctgaaggaatatagtttccaacctaggcaagcagtcagtcaatgtgagggtatggtagatattttcagacatgcaagttctcaacaacaaccaattccccttaaatgctgcttttcctcgggaagttgctaggggagttgtttctctaaaataacagtgtaagcccaggaagaggaagcgtcctgggaaacctgacacgaagcgactgtactgtgctgcaagcccatctcagtctagaagttcggtcttcagtgctggggaattttcttgaaagaaaatttcaattagtttttcctgccatgatccatagttattttttggcagtgaggaataagagagttaaaaaactgaatgaaaactctaggtggggacagggtccctcagtcagtgtgcagtgacttggccacactgtttggggaaggacactgcacatgtcattgtctcttaggtctttctcttggctggtcaggtcctcctgcttgggggggtaaaggcctggctaccagcattcctagaactgaccactgtaggtcacaagaggttggaggggtccagagagcacctcacccccatgtgccagccttgccctcccctccttgtggccagcacacctctcttgctcttgcagtgccagcctcagccaagcaacttctccgtgggaaagggctggggccaggctttccagagctggggtgtgatttttaaataggctttctttctggcttccaaatttttattacccctatttcctttcctttttttcttaagggtttatgccctttttataaagctccttttctgttgttctagtgaagttttaggagagattagaagatactagtgttcaagccaccatctttactcagaagtctgtaccagcctaacttcataggtatcatagcattgaaagaactaatttgattggccggggtgcagtggctcacgcctgtaatcccagcactttgggaggccgaggcaggcgaatcaccaggtcagaagtttgagaccagcctgaccaagtggtgaaaccccgtctctactaaaaacacaaaaattagccggccgtggtggcgcgtgcctgtaatcccagctactccaggaggctgaggcaggagaatcgcttgaacccgggaggcagaggttgcagtgagccgagatcacaccactgcactccagcctgcgtgacagagcaagaccccatctcaaaagaaaaaaaagaaaaaaaaaaaaactaatttgtttcaaatggcaatcattcttcatatatgttactatgttggaacaaaataataataggcgtcccactcaggtagacagataccattcttccaggtaggactgtggtatgaatagtactttaatgttttctatattttaatggtaaagttgagcatgtgtagacgggtatttataggacggatcactagccagacacttgtaagctcctatagaacattaatagctataccttatcctacttttttccttaagacagctgtgaaaacaaacagactaggaaaaaaccctgagggaaatatttttacaagctgggtcagaagaggttttattttatagttgttcatccaaagcatacttgtctttaggcaatgcaattgatttgttttaaattaagaaaaaaatcttaataccagcaacatatgtagtctttgtaacattttctctatttattaaatatgattattactttaataaatatagtaagatgaaaagtaaatatttgcccttgggtttttttaacctgaaaatgtgtaataggcacatagttattcatttgaaattatctttcacactatcatctatccgatatctacagataactccaaaatttacatcatagccccctcccttctcctgagacatggcgcatcgttcccagacacctagtggtgtccgtctgaatcctggtgctcttctccctgtgccacaggcataggcagccctaaatggagcgtgatttcttcccctttactccacccctgcgttttttcctaatgctctccagtgatggattctaactcagtgtcgccagctttctggttgcttaagctacatgtttgagagaagtttctaaccctgtttttaattcttaaccctcccatctccatagctggatctgtcaattctaatttagaactgtatctcgtaattattctttcttaaaaactgtctgttcccattgccctaattcaggccctgtctctcttgccagtttcttaaaatggcttcttagtcttctcatgatgctaacttcttactcagcagtccgtcagacatcatgctgctgcagacttttgaagcacaattttgggttggtttgtttgtttgtttgtttgtttgtgacaaggtctctctgttacgcaggctggagtacatggtgtgatctcaactcactgcagccctgacttcccaggctcaagcgatcctcctacctcagccttccaagtagctgggactacaggcatgcaccaccacgcctgactaattttttatattttgtatagacagcgtctcaccatgttgcccaggctggtcttgaacttctggcctcaagcagtcctcccacctcagcctcccaaagtgctgagattgcaggcatgaaccaccacctggccagttctgtcatctgggagtcttgaagcacacttctgttgatcatccatcttctccttcctccctccttccctgtctccctccttcgtttctcttcctttttctcttcctcttcttcctccccctcctcctcttcgctagtggtttccccttatatcttcaaaataacagtcatggtatttaaaatcctttacagtatgacccaatcaaaaaattgttttgaaattgcatcattcttatgtcgccagactattcaccactcccatcggctggaaatgctgtttcttcagatttctacttgttgaaacctactcatctttcaagccccctccctgatgctgcaccccccagggcccctcctggggtgtcttttgttgagattcctttttctgtcctctcctgtggcactttcagcactaccgagcagccctcagaagaggcctagtagcacgtgtttgcagtgttttttcttccttactagtttaggatcaggaactcgatcttacctttctttttcccttcgtcgtaagtctttcttggaaatgatgtttaatcagggaaacttgctgcatttaatatcttagaattttaggtaagggtttatctgtttttaggtacatacaaataataaacaggccaagttccttaatatcttatgatttactaaacttttgtataggtctgtcacacaaataatattcagaactcaactgcctgcaatcttgtttactctcaacagtggagaaatagtaaagtagtctgttcagcagagtcagagtccatcacaaacaggtcagctttttccagcagtgttcagggctgtttactctgattgacaaacaattctgagtaagccgtttcatctggcttccaagcctgtagcagagaaggaacaataagacagtcctaaatgtgtaagattctctgtcatctacttaagtgaacaggtaagtttacagtacagtttagaaaactttccattgaaaatggtacaaataaaaaggaatttagtgtcagtcctgagctatctaaatgggtctcagtagccaaagtttttgtatctgaaggatacacaatatcctttgacaacaattagttgacctgagggggaatattgatgaaacaaccctgtaggggatggatcagctggaatcggtaaactgacatcaccagcttcctgcatcccaccatgtgagttactgactttgtatacctcctctcccagttttggaatctgaagttgaaagaattgcttattttaagtcagtgtagtaactaagctttatttaaaagccctgttttcagtggctcatgcctgtaatcccagtactatgggaggccaaggcacgagaaattgcttgagcccaagaattcaagaccatcctgggcaacatagtgagacccatctctacaaaaaataaaaaattagccgggtgcggtggtgcacctgtggtcccagctacttgggagcctgactgaggtgggaggatcacttgagcccaggaggttggggctgcagtgagctgtgattgtgccactgcactccagcctggagtgagaccgtatctctaaaaaataataaaagccactttttaaaaacctagtatcttcttgaaaggtgttttttttgcattaaaatgttaattgaagaaattctttctaatctgttaagcataaagttagccaaaagggtcattcttggctcattgtgtgtaatggccaagtggtgtagagcatctgcaaagtagattaatagaggttgttttggtggtggcagctaaaacctaggggcacgttgaaagtcctggaagaaatttcataatgagttaataatgtatgcctcatgccgcttattaacttataatagaatcagtgttttaaaaccatgtttctggtcaaattttagtcagatattaacttaaatttttacatactttttcctccttgtagagtcttcctaatattctcaccgatgatcgatttaaagttatgtttgagaaccctgacttccaagtagatgaagagagtgaagaatttaggcttctgaatccacttgtttcaaaaattagtgaaaaaaggaagaagaaactaagactcttagagcaacaagaacttcgtgaaaaagtaatgtactccttatcagttagaatttgctactgtttctttaatgtaatgttttctttgtaagttagaagagtctttgattatacttgagatgtaattaattccatattaagtgtttgacattgggcttaggagtattatcttatttaattaaaggcatttctcctgatgcatgcagtagagcagctgttaggcactcattaatgggccagtgctgcttcagagaaaccaaggggtctgtgtttgactgggggaaaggagttgctgcttactatttttattctcaggaagaggaggaagagccggaaggaaaaccaagtgatgcagaaagttcggagagttcagatgatgaaaaagcctgggttgaagaggtcaggaagcaacgcagactcctccagcaggaggaaaaagtgaagcggcaggaacgactcaaggaggaccagcagacagtcctaaagccccagttttatgagatcaaagcaggagaagaatttagaagcttcaaagattctgccacaaagcagaaactgatgaagtgagtagcactgcctgagcgcacagttgacatgtaaccaagcccttgcttttcctctctggcacattgccctaaagatgacatttctgtctttggatgatggaggtgcagagggtggaggggacgagggaagcaggggaggtaaggccgtgcaggaggtgatgtgagggaagcacccaggaggcctgaggggagcgtcgctattgaagtacattggtctctaggggatttacttatttgtcacaactttttgaggtatagtttacatgcagtaaaatacagggtagagagagccttatgagtatcagtggaacacttttaagctgcagaagccacacactttccttgtccttgttttttccccatggggttccctcacctacaaatacttactctgtgccctacagatcagtggtttgaagccttttggacagtggttgctaggagatgacaacttttctgcttcttcacaaagttattttaaaaaattagaacctcggttatgtttaccccatctcactttacctggttattgaaaaggttacttggaaaatttgccagaaattttaagtctttttcaggaaaattgagagatcgaaaagagtagtattctagaataggcaaatatgtagaaagaggcagaaagtagaatggtggttgccgagtgtttcatgggtacagagtttcaggttggattatgaaaatgttctggaaatagttggtagtggtggttgtacaacagtgtgaatgtacttaatgctgctgaactgtctacttaaaaatggttaaaatggtaagttttatgttataaatatttaccacccttccaaaaaaattgaccttccccaaaaaaggtagttttatttgaataattttcagttgtcaggagtctgagtcaggaacaagctaggtgtcaagcccaagttgtatgtaaactctaaattatgcaagtctctgctttgagaattcctaggcaaagtattgatgcacaagattggaatatgatagacggtcacaggagatgtcttaaaagaatagtggaatgtctggggagccaagggagcagtcttgaggtggagcaagaggagtgggcagaatagacaaggtgttaggctggggtcagtacatttctgtaccttgtacttctccagctcccagctctccgtgcaggagaaggtgttttctccgaagtgggaggaggaaaagggtggggaggacatcagtgaacaggtggaattgtttctggggttgagatatgttttattcatctttatttcaccagcttctagcaaatatctgcaacaccagatgtagtgaatccttgaatttagaattcagaagcacctcaaaattctggttctgatgaactaactaaagatatgtccatgaataaagaagctagtagagttgacccttgaacaactcgagggctaggagtgccaaccccctgcaaagtaaaaaatgtgcatttaggccgggcacggtggctcacgcctgtaatcctagcactttgggaggccaaggggggggcagatcatgaggtcaggagatggagaccatcctggccaacatggtgaaaccccgtctctactaaaaatataaaacttagctgggtgtggcggcacgtgcctgtagtcccagctactcaggaggctgaggcaggagaattgcttggacccgggaggcagaggttgcagtgagctgagatcacgccactgcactccagtctggcaacagaactagactccatctcaaaaaaaaaaaaaatatatatatatatatgtgtatatatatatatgtatgtatatatatatgtatatatatgtatatatatatgtgtatatatatgtgtatatatatgtgtatatatatgtgtatatatgtgtatatatgtatatatatgtgtatatatgtatatatatgtatatatatgtatatatatgtgtatatatatgtatatatatgtatatatatatgtatatatatatgtatatatatatacatttaactttttgtgttatttattttcactagaaagtctagacctaacacatacaacttttgatttcctgaaaacttcattttttttttaaaccttcttggtgactgagaacctagaatatccccaaaaactttactactaatagcctactggtaaccagaatttttaacagtcaggggtcaattaccacatattttgtatgttctatgtattatatactgtactcatacaataagataagctggagaaaagcaaatgttattaagaaaatcataaggaaaggaaaatatatttattcattaggtaggagaggatcattgtaaaggtcttcatccttgttgtcttcatgttgagtggtctgaagaggaagaagaggagggattggtcttcctgtctcggaaggcagagtcagaagaggaggaagtggaagggaggcaggggaggcgagtaatggtgttaacttttattggaaaaactgcgtgtaagtggagcagtgcagttcaaacccatgtcattcaagggccaactataatgttcttggtatcttttgaaggtgttttctttactgaccaacctcactttttaaaataaccactttcttgagatataatttatgtaacatacaattcatctgcttaaagcatgcagttcactggttgttagtaatgtaacatacaattcatctgcttaaagcatgcagttcactggttgttagtaatgtagcatacaattcatctgcttaaagcatgcagttcactggttgttagtaatgtaacatacaattcatctgcttaaagcatgcagttcactggtgtttagtatattcacagagttctggaactatcaccttaattttagaacattgtcatcaccccaaaaagaaaccccacgccttatgggcagtcaccccacatttaccctaccccatctcccatcctgaggcagccactagtttacttttctgtctctatcgatttgcctattctgacatctcatgtaaagggaactgtataatgtgtggccctttgtggctggcctctttcccttagcacagtgtctttaatgttcatccgtgttgtagcatctatcggtgtagtcagccctctgtatccaagggttcctcatccataaattcaaccaatatgggctgaaaatattcagaaaaaatttgtaactgtactgaacgtgtacagacttttttcttgactttattccctaaacaatagtataacaactatgcatgtagcatttacattgtattaggtattataagtaatctacagataatttaacatataggagagggtgtgcacaggttatatggaaataaccacaccattttatacaacttgagcatccatggattttagtatccaagggaggtcctggaaccaattccccagcggataccaagggacaactccactccatttgtttttattaccaagtaatattccagtgtatgtatagaccagtttatatcccttcgtcagttaatggacatctgggtagtttccactttttggctattatgaataatgctgctatgaacattggtttatacagttttacatgtgttttgcatatgttttcatctatgtgcaagaattggaagaaattgctggtcatatagtaactctatgtttagccttttcagaaaccggcaaacttgtccacaggctgtgccattttacattctccagcagcgtgtgcagcctcactttttatacagctgttatgtgtaggtgttttactgggagtcctgcttggtttgtgctgttctggttctgtggagtaagtttatttgttgagtatatgctgtttttgtcttgctctatttactgctttatctctggctcttgaataagtacttagaatagagtgggcacttgagaaatacttgctgaaactgtgaatcttttttgccatgacaacacatcaggcaactcagaagttactccttcaagatctgctgagaaaggactccttttccccatagccattgaccaggaaaatctgggagcagttgttttgagtgtaaccacagcaacaggaggctgtgatttgggggtaggcggtctgactaatctctctaacattcttccttttgcctgggggctgtagtaggatatggaggtataaaacaaagaggataaaaatttgtatctaagaataacccatagcgaggtgaataaactgcagttaaacattctaagttaaatatcaccaagttaaacattcttactaagttaaatataaccaagttaaacattcttactaagttaaatatcaccaagttaaacattcttactaagttaaatatcactaagttaaacatcctttttgagaactatataagtgataatatttacatgagtatttggtgaagcattaaaccacgatccttcagagaactaaagtgactctgtatgtttattctgcaagttaccgcaagccagtcaacaagagacaacatcagattgaatgtgttatatttaaatgttcacttggacttgcctagctttaaaactgtttctataaagggaaaggtggatcgtgaatggtagctggagacttgagtgagctgtctgcgttgcttggtgtggtcatatggctttagataaacacgtgtgtctgttgacacatatttttatgccttacagtgggctaactttgtttgtgagtctgttcatccacttatcagcctctccaccacccattcattcatcaagcatttatcaactgctcagtgcgagcataccagcattctagacccaggggatgggaagaacgacatggcctgcgtacctgaagcgctcatgggaaaggagcataagaaggaaggagctgaatttggggagccttgaaatcatatggaaactggttgtggaaagatgcagagtggagcattcagggctggtgggaaagatagcattcctggcagaggcacggtgcagccacaggcaggccatgcgaagggttgggggtgccttcctacagccagagcatggggtgcctgaaggggtagccgagcaagcactggaaagccacgatcttacagcttagatgaatgggatccaatctattccaacccctcccctagtgttgtaaatacttttgtaataaaagcagtgcatgtttgttgtagcaaataaaaacataggcataaaaagtccctattcccagaaacccattagcagaatatctccattttagaaagacaatgtgcggagaacctggacacccagagaccagctctcaaaccattagaatcatcccagttagaagggccacaggcctgaacgatggggtggagaggagcagacagaccagaagactaagagtgagaaagaaaaaggagcacaaactccaccatcagttcctaataatatcaaaggagaagggaatagtcagggatgacgtagagatgtctagtaatgttgccattgaggtaaaaaatacagaatgcaaaataggtttaaggctaaaagtaatgagctgggttttgtgcacattaaataaaggagcccatgcgtcttctgtgtcacattcagtaaaccaatggcagtgtccatcgggcccaggaagaggaggctggagatgtcagtttgagagataccagcctttattgtgtggtcaagatcacgaatgaaaagagatttagcgtcattgtataaagtaagattagggctaagaatggaagcttggggaaaaacaaatattttacttgaatctgtgataaaatccataccatacacctctctagagaaaaatacaaatgcctgtgatgtatttacatagaattttagagaattcacagatgtactgattgcctagaactaaaaattctgttagaaagcagacagaggagaagatggacagtaaagatactggagttgtcaacaagctgagaggaaaactggaaagggccaaacctggagcgtgtctcagggaagggagtggtcctgacacccatcggagtagagaggcccaggaatgaaggctgggaaaaggccagtatgcggatggcctcactggcactcgtttctcagtcctgccaagtggccaactgcaatagagacacaagtgactgggagatagaaaacacagtaaacagttagtgtcggtgagtctttcaagaagtttggtagtgaaagaaagggatgaaagccaataacttgatggaaagcggtttatagacttgagagatgtgatttgttagtaggcagagaagactcagccacagaaagtgggtagtaaggaatggagagaattgagtcagttgataaagtagcatctggtaaggaactgggtggcagtgggcccgagtaccaggtaaggagagcctcagaaaagacaaggtatgcatcctcagagacatggaggaaagaagtccagatgcgtgaacataggggacatcattctggttagaggtagaaagattgggaaggccatgcttgttggcctcaggaatctgggcacatcagccttttctggtatctggagcagccatgacctgcaaggtataggagtggagctgtgtgtgttggtgaacagtggagaaagagagtccttagaatgaaaactctccacgtttcagtagatggggataacttctctccttgggtagtcaatattagctgccaggcagcctttcagttccatttatgaaagcattctttgaagtacctgccctgtggtaggtcctagaaattcaaagatgtttaagacagtccctgcctttggggagctcatcttcttcaccgggtagcttggtagctttgggtgagctttttatcgtgtctgcaacattatccactttgtgaattaatatggcatgtttttactcttcagctcacattcctctgatagtggataagagctgaggtaatgcagctttgttttaatataagcatttaaaaatctaatctggaaagtaattaaattccaggcttacatttttaaaaagagaatcttgtattactcaaggaatacgtcctcagtactatgtaggcatgttatcattgtaacacttaagagtgtggactgaaggttaaagcctctcctgtcccccacctccctccctgaggtcatggctgtgtgtgcaccacacttctctcttttaaaaaatgcattcattcccgtatgtgttcacactcacacatctatacctgtagctttttttctttaacatgaatggttcatactcctcatgttattttttgagatgggtctcacactgtcgcccaggctggagtgcagaggcgcaatcatggttcactgcagcctcgacctgctgggctcaaatgatcctcccacctcaccctcctgagtagctgcgactacaggccaccacatgcggctaattgttaaattttttgtccagatggggtctcattttgttgcccagactggtgttgaacttctggcctcacaacatcctcctgcctcagcctcccaaaatgctggaattgcaggcatgagccactgtgcccagcctaattatactgttttaacttgctctttttgtttagcagcaagtcttggaaacgtttctttgtacgtacagtaggcttaccttctggctgcataaatacttcataaggtgggtgtgctgggatgtatgttgttctctgacgatgggtgttgaggttgctgctttttctctttcccctttcacagtcgcaaatgtgtgtatgcacacggacaagtatttctttaaagcgtattcctagtaggagtttgctggatcagcgggggtatgcgataagagactgccagatcaccctccaaaaaggcttgagcactttgcactctggccagagcgcctgtttccccacactccagcaacgccggatattaagaatcttttacatcttcgttatgcctatagatgaggcatcagatttcgtggttgcctgagtttaagtctcttgaaatagggcctttgaagcaacacatggaaacggaaagcattcaaataaagtttttactaaaccttatggcatatgtaaatatttgtcaaaggtagttatttaaagcaaagtacttaaaattaaatttaaaaaatacttaatcctttatctgtggattctctttctccattttctagtttattccctccggtgtagactatggagtgagggctcctttaattagagttaattaactcttctcaattttgtcctgaagcacatgcctttatgaatatgacctccacccccacaccgccccttccatgcagcgggattcaaaacctctcatctgaggagcattgagttttaattaaatatgtgtgtgtgcgcgtgtgttcgtattttaaaaccccaaagtaaattagtcagcctccctggtgcatctaaatatttaatttgattttcttcctagtagtttctgcccactttcctttttattttaagataaatttactaataatttaggttcttcccctgggagccttctgcattctacactgagtaattctacccactttcaacattgtaaagcctgtatctattttcttagcaatcacaagtttggggattgtttttatctgcttgttccaattagattttcccctagaatcctttactatacaccaatgaaaaagtcccccatggctgtcagacctaaagtaaagcctaggcagggaaaagaagcaggggcggggcagggagcgggggaggggagaggagggggagggaaaggccaattctgccatcctcctctgccacctgccagtgtcctggaagaaacatgctgagaagcgcatgcagtgtggtgttctgccttttgtttttctgttcaataaggaattttcaggtgttcctacagcagtgtctacttaggtcatctctgaccgaagtcacactcaagaagcaggctgtggaactgctgggttagcaaacgctttcagtaaactgactttcaaagggagggaagtggaacttctttaatgtagaaacctccacacacggtctctgtctgtgtctgatcttctgccatggtttgttccaaaactcagcttgtctttccaaatagcctagacagaacaagtttttacaagtgcacattgaaagtacattgagagaaaccccagaatgtgtatgccctatcatggaggaagtaaggtcattcttaacagagtaataattgctcacaatttactggcaaagtctttttcttcctaaattagtgttttctgtataccatcttctctcagtggttccatagttattcagaattcctgttaacttttttttttaagtgaaagcaagtttattaagaaagtaaaggaataaaagaatggctactccataggcacagcagccctgttaactttgaaacctcagagtttatagctatgaaaagaaagaagaagaatgacatgaacaggttgagggatttgctgaggctcacataattcacatgcatgccagagtccgtttacacttcacttttgaattgttcggaaaaaaaaaaaaaaagctaaccgaaatcttcatttcattccgtttgtcatgtggaagcttgtcattgagaatacttaatggacaagtttcctgaacaaaactgtgtaaatcaagtatggcctgacacttgcctggaaaccagcaattctgaaattggaatcctgcttagaactgaatccttacgtggcctgcagcaagtcatttcacatcttacctcccttttttgccatctataaaggataaatacttctgtctcagggatgttgaaaggattaattagttagtctataaataactttgaagatgaaaagtactttaaaagtgcttcttaataacattattgcttagaaaagagtgccacttttatgctaaccactttatgtctcaaattatataaagaaggtatgtttagtacattactacgagttgtaaactagagataaatttcacatggtgtgagcatcaaacattagcttcagaatttcaaagaagcatcactttgtcttaaggatcatttaggagctgtgctctcagtaattagttacaaagatcatatttcagggaaaaaaagactctttcacacagttcagcctttttctttcttcagtcaggtttcttagccatcactttaaagggctgcattgaatttgatctggggcagggaggacaggagacagtatactatttttgaggagggaacagaatagaagagaaccatattctttgtcttccctcgcatctctctcaatcttatcagggggataggaatctattgctttagccatttctagaaaagttagagtaactgtttaaacttactgaaaatatatatcattaggcttaattcagtttatttccctctaaaccaagttaacaaaaagggccagtgttctagtttataataaaacattataacttgcagtgaagtttcattttataatgggtacaaaattcaaacttaacctctttattggaaagcagagggggattgtgttaattacacagatgacagtgaaatgcagggcacagcagactgtaacagagacacagattatataaagagagcctagaaaaatttggaaaatgtgatcaagaaatgaaatgagatttaaatttggaataaagtatgtcagaaagagtaagtcaagtaagaaactaaaaggaaaggtacctggagagatagcagtggctagagctgaatcaggtacagttacccaaagtgtaattgcttttgttttctctcagcgtcatcagacagattcatgtttcaagctgttcatgctgtgggatgatggcttgcagtctacggagttaagactgagtgaaggaaaaacgagaattatcatagctcttctctgtggcttgacctggaggacttaatttgtgctcattcctttgtaaaaggtggacgagtggccaaattactcacatacctaatttgtgtattgtttaaatatatcattatatcataaatgccattgaccattatgatcaattacaggcttcaggagtagattgctctttgcatttggtcttcagaaatatgattgattttagtaagaaaagtagcaggcattgaagtgtttggtcctgccacttaagatattaaattagtgggtgtttttgccagccattgttttacagtctatctctggaatatgaataatgactatttgaatgcacctaattctttcaatttattgtgttaaatgaatgatattttctgtttacatgtgtaaacatttttcttcgctatcaattctaatcaaaacttgtttcaaatggtaaattaaaacataattttgattaatgtggcattcttttgaatttcccatagcaaaacccttgaagatcgtttgaaaattgaagcaaaaaatgggacattgagtgtatccgacaccaccgttggcagcaaacaattgacattcacgttaaagagggtgagttgtcttttattgttattttttaattcacaaaagaaaaatagcctttcaatagtgtttgtgtgtgtgtcctcagagcagccttctcaatgcttttcccctattgaggaagctgtgttccctgttctaacattttccttgcaaccagagcccctggtgggccaagagcacagtgtgtgactgcagcagagccaggaatgtcactggtgttccaagggagacagggagttagtggccctggagttagctctgttggagatgaaccagccatcttggtttctggattgctctgtagcctcaggtgcggcttataaagcaaaagtcccatcctgaccctctaaagatgtagggctactacatcctgaccctctgaggatgtagggctacctcgcatgtatatggactttgaagaagaccgggaattggcgagttctgataacttgtgacagtcacacccagcttgcccagatactatccttttagaagacagactactctgcccgtggtcattctattctaaattgatttataagatcctttttttttagccagtggtaataatacgtgtcacacattgtaggaggagtaagctgcttaaatatttactgttaactggatacagttttatttctcaaaaaatttttttctcattcaaagtcagtcctcttcaatatagtcaccaaatagaacagaatgacaaagatttcatccctttttttttccttaagcagtagtagggagattattcttttttaaaattgagatataattcacagaccatatgcatccttttaaagtgtacaattcagtggttcttagtgtattcactgagttgggcaaccatcacactgtgtaattccagaacattttcatcaccccagaaagaagccctataccctttagcatttacccccatcttttcatccgccagcccctggcaaccactaatctacttcctgtctccatagctttgcctgttccgggcatttcatacaaatggaatcattcaatgtgaagtctttcatagctggcttctttcactgatcataatgttttcaaggtttattcattcagtggtgtagcttgcattggaattgcatttctttttatggctcaataatataccattgtacgtatataacacattttgctattcattcgttttttaagggacacgggttgtgttcttttggggtaagcgattaataattggctgtgaaaatgaatgtgtaaatttttgcatgaacatgtgtttttatttatcttgggtctatacctaggagcagaattgctagtgtagctatttaactttttgagaaacctgtcagactgttttctgacagtggctgcaccattttacattcccaccaagcagcgtatgagggttgcaggttttccacatccacaccaaacctgtctctgtcggtcatctttattatagccatgctagtgggtgtgagtggtgtgttgtttgatttgcaggtccctaatgactaatgagttgagcattttatcatgtgcttattggtcatttgtgtgtcatctctggagaactacctcatcacatcctgtacccattcatctctgatttctctaaaattttcccaacgtgcatccaggaggcttgccaagtaataaaaaacttcattattctaagtgcaaaaagcttttcagttaattctgtctgctgagagcaaatttgccctcttacatttatcacttacgtaagccaaatacacattcagagggacctcattgtgcctgttcctaatttcttatcaattttctttatacctggaaacattcgttgattccctctgaaactcaagtgatgtcaaatggggcaggagcagcacagcctggaaggatcccaggtctgcagcacagccacctcagctcctgcagaggcccctctgctgggttgagtgagcacctaccttgcagtaacatgaaaatacaagccttttcccactgtttctaaatcgggaggtactgagttgaagatcagtttaaaatttgtagtaaaatgaaaataagatggctctgaaattatatttttgtttataaaaaaagtattaagaattgctttaaatggcctcataactgaatcaagcagaggctttgaaactgttttgaggactgtgtcaattaatgtttgatgtgtgtgtttccttacttgacagacattttaattattaaatctcagttttacttgagttctagtttacagtaaattttacttattcgggcagttgttcatagaagtctctttttatactgcatgttagatatgctcaggtagaatcttgagtttttcctatgtttgcatatgtacctcctaaaatttcaataaaattgaagagagaaaatccatgctttaatgtcgtttaaaattgtatagtggcaaaactgggattcagtcacaaatctaattttaaaatgccatttagtacagttcctcatcaagcctgagactgttgctgatacaaatgtgcctgtttgcacctgtcctcctcctccctctgtgacaggagtgctggaggctgtggtgaagtagtcgggaagaggaggcagaagcacccaggagaagcgctaatggcccatagatcccatcctcctgaatccgccacatggcggcaaggccttccagatgccgccttgggagagaggctagtcatagtcctttttctgcatggaaatttgtctgcagaacaatagtcactgcttacaagctcctcttgaagctcctaccttggtggagaaagtctggcagagcttcccaaaatgtgttccaggagatgtaaatggtgactctggaagattacttttgccatcagacagataagggaaaaaccttggactgatgtccatgttgaagacttatgaaggtaccttaacttagaagctccaacacacacaccttgtttatctgtatttagcacatgattttccaaaattatatgaagaaaccctttttttttttttttttgagacagagtctcgctctattgcccaggctggagtgcagtggcaccatctctgctcaatgcacgctccacctcccgggttcacgccattctcctgcctcagcctcccgagtagctgggactacaggcagctgccaccatgcccagctaattttttgtatttttagtagagacacggtttcaccgtgttagccaggatgatcttgatctcctgacctcatgatccacccatctcagcctcccaaagtgctgggattacaggtgtaagccaccacatctggcctgaagaaaccctttttaaataaacccctgattaacatgaagaatcgaaatattgagtaactggtgttggttcactttacagggctcctggtggtgtcatcacttgctcagctagggagtattagaaggagttctgagttttccattaacgcatgtgtattgatgcctgccctgtgctgcatgctagggacagacatggctcttgccaccacagttctcagtctactgggagagagagacagcgggtaaaaattatacacctctaattatatcattagaactgcggcaagtgcttcaaaggagagcagagggctgtgagagtgtttggtaagggaccaaactgcacagtttcagtaagcacaggactgaactgacatagtatttctattttttttaaatccttccggttgctgcatggagagttgcctcaagggatatttgaaaggaagcagagcacgaggaaggcagctccgtggtggccatgcttaggagcggcagcagcctgggcttgggtgggaccctttgagacggagcacagtggaggagtttgggacgcacttcagaagaatacacaggacaggatttactttgaaaagacagttgaagaatagtaatagtcagagaagggacttaagaattatgcagaaacccggtttaagaacttattagaatgggagaaatgcatcctttttttttttttttttgacattacaaattgctttccttccccgctattctctcacttgcaactcttcaattttagaagagtgggtaatatccacaagaggtgaatccactggacactttctcctcaagggtaacacacagatgcatgtgttttgttaggtgtgtagaaaatacagatcctggctgggcacggtggcgcacgcctgtaatcccagcactttaggaggccaaggtgggtggatcacaaagtcaagagatcgagaccatcctggacaacatggtgaaaccccatctctactaaaaatacaaaaattagccgggcgtggtggcgggtgcctgtagtcccagctactctggaggctgaggcaggggaatcgcttgaatccgggaggcagaggttgcagtgagtcgagattgtaccattgcactccagcctggcaacagagcaagactccatctcaaaaaaaaagaaaatacagatcccagagaagcaggttccctgggtgtccataagacggtgcttttccgctttatcaactgaggcccctgacagtgctttctcagtttaccatgtgtgcagttccaccgctaagaaatttttttttttttgagctttaccttcaggagtttgtattttcaaaaccatcaaatgtgtttttaaaaccgtgtaactcttaacctttgttgtggattctgcactgatgctcttctaagaatttctgctgaaagtagttaaaccatttggcgccagggatggggtagggaggagttccagctcccatgtgagccaatgagcattgaggacaaatgtgagcacctttccagcagtcagcccgagagtccacatggttattgcagctgtgaacgtgtgcatcgtctgcctggcttttatcagtgattaatgagagcagtttgctgcttttaaggagaagtggagttttgggaaacagctaaaaattctttggagcaagttctagtgaatgaatgctttaataacgtacttttagtacatttaagtattttttgtttttaaaaacagtgggaataaactaatggctctagtttgtaaacaaagatctctaaaaggaagtggacactctaagtgatatcatcttcttaaggtggctcttgtgtaggctcttttaaaacatcccagtggttgtgtgagtgtgttggttgaaaaaccagtctcctactttgtaggaggctggtctgtcagggcccttctcttgcctggggttcagaatttctgcttttgcattgatggtaaaagttggccttggtcctgctgtttctgccagggtagcatttgtcagagcagagtccaggcagccccaccatgtcccctggagcctgtgggcagcatttctcctggcagcagttctgagattggtggtggtactgttggcagcctgacggttaccagaaaagaggtatagaattttctctctttccctctactcatttcattttctcttttagtctgaacagcagaagaagcaacaggaggctgagaaactgcatcgacaagaaaggaaaagactccgtcgttcggccggacacctgaagtcaagacacaaaagaggacggtcgtttcattgatttgggaagtggtcctacctgtgattagggaggggtacgtctcccccaaactgatcatcgttagggtgttaaacacagacgaggaaacacacgtttttaaagttcatgtacgttcttgtacacagaggtaaagatttgaaaacctgtgccttgtgggttggactttgaagctggccccgccgacggccaccgcacagccccaggggtgtgcttgcgagtcgttgctccctggaaacattgtcctttccccacggctttaatcatgaaaaccaggctggggtttttttaatattgtgaaatgtacaccatgaaatgaaaggtttatcctgtgccagaaaccaaggtttatcatgctctaggaacttttttcttacactgcctaccgccattcatgattaaaccatccagaaataccatccctgttttacctggtgtctgtgtattgcctgtgtttgtgtttataagtttatgctgataggtttgttcggcttgtttatgtattagtttgggatttgtttttaaataatttataccaagagagtataatctaatggtgcaggttgagagcatcccaaatccgaaaatctaaaactgtttgagcactgtatttatctgttcttgcactgctataaagaactacctgaaactgggtaatttataagtaaagaaaagaggtttaattgactcacagttctacaggtggtacaggaagcatggctgtggaggccctgggaagcttacaatcgtggcagaaggtgaagcggaagcaggtatgtcctgcgtggctagagccagaggaggagggcaaaggggcagatgctgcacactttcaaacaccagatctccaagaactcactaacacagaatagcaagggggaagtctgcccccatgtttcagtcacctccctccaggcccctcctccaacaccgaagattacaatttgacatgagatttgtgtggggacacagagcaaaaccatatcaagcactgacatgacattggaggaaaatgctcattagagcttttcaggttttggattttcagatttgggatacttgactagtaaatataatacagatattccaaaacacacaaaaaaaccaaagtctaaaagacttctggtcccaagcatttcagataagggatacccaacctgtaataatgggaaacaagcagtagaggctgttggttaatcttggcacaagtttaattacaggttttttttttttcctgtttcttaagtacagtcaaacataaacttactggaggaaacatttataaaaataaatatactttcatttgaatagcttctttgagaaagactccaagaaaatttttttttcattagtcaaacggtggtgtgcacttgtagtcccagctactgaggctgaggtgggttgcttgagcctgagaagtcgaggccagcctggacgacagagcaagacctgcgtctcaaaaaaagaaagaagagaaccaactttggtttccttagtttttccagctttgatgtgattttggaggtgcctttatagatttttaaggttctttatatacaactgaaatagtaactctttggactgtgaatgatacagcctaatttcgaatagcataagccgagaggcagaatgcattaatttacatcaccatgcttgggacatggaactggcctcaggaacacctagatccatggctccacggtcagtcagctagcacatgcgcactctatctctgtttccctctttctctctctctccttcccctactccctcccttcctcctcctgtctcaccattgttccttctctcttcaggcctcccctgctgtcttttccctatgtgtttcccgtccccctgcctctgctctctgtgctgcttctgcttctgtgcagattggcttgttcccaaggcagggaacagctcagccatgtgtccacttctgtggtccgagaaatgaggtctgtttacagaaaaaaggtgtgtggaaggtggggtatgtgtgtatgttcttgttcctggggcacccagccccatttgtgctgtggtaccagggagtcctccagctgttccaacccctggaccggtactgtcctttttcagcttctttccccctaaactcttgctcactgtccacctcttctcaaaggaagtggctgcagcttcctgttgccttctcttctctgtttctacgctgcctccctcagggatggggggttttaaaaatttagagagggacattttgctggctggaatgtccccaggggttgggtgtttatgcccttggcctgtttcctgacgtcagggtctgtcacgtctactcctggctttcccaggcccctcttttccttccttcttgaagggcctcctggttctgtggggagccagtattccgcagggccagattccacaggcagcggtgctctctgttcacccagcactgtcagcacaccaggaggtcaggacatcagggtagaggaggagggccaggatcacttctgggcacctgggaggctggcagtttagtagaaagagcttgcatttggaaccaccctgacacagggtcgaattccaggtctgttgcctactagttctgtgtcttttgactgttgccttaatctctgtgaatctcatttcctcctgtagatcagcctaatacttagtttttattagagtaaaatgaggcacttacattaggtacagcacctggcactgtgcaaggctcatgaggatttgacaaagcttcttgaccattgagggttttcaagagcaggggaggtgacctcggcttttgttctggagagttgctgaagggcaggcggagggactgccctgagtctgagggacacagaaggagtgtccgctgacgacagctatatgggtactcctcctaggcctgacccgtccctcattgccccagttttcctaccgattcagcccttaacgcaggcctgcctcttcagggctgattcccagcgtgcctgctctaatccttcatgtcttcgaagtttcctgtttccaagttttattcagctttcatactctactccataatttttccgtgtgtgtgatatactactcactagtcctaggaaatggccatttcccatgggtctctgtcccaggcacgcacagctgggggtgttcatgagccagtgcgagaagcatttcctcacagatggggccccgagggcatggcttttacagcgggactgagctgggggttcctgggctgccatttctccccttcccctgctccagatcccctcagcctctgacaccccagacctaaggcccaagtttgtttatttgtttccaagtttgtgctcagcagttaggataatggtggctttggagagaggggggaacatggctgggagggacgtgatgggggatcctgtttggtcttgttccctcacctggtggtggcttttcccacgggcgcactttgatcactcctgggctgctcacgactcatgtctctttctctgtgcttgttatccttgaacacaaagtttcattgaaaaagaattactcgtgttagccaggatggtctcgatctcctgacctcgtgatctgcccccctcggcctcccagagtgctgggattacacaatgaaaccctgtctctactaaaaatacaaaaaattagctgagtgtggtgacaggcacctgtagtcccagctactctggagactgaggcaggagaatggcgtgaacctgggaggcagagcttgcagtgagccgagattgcgccaccgcactccagcctgggcgacagagtgagactccgtctcaaaaaaaataaaaagaaaggaaaaaaaaaaagaaaaagaattgctttatcgaagggacatgtttcatggctcctcacaaaaccatttctatagataactcataacactgtaaggttatgttttttagatatttttctgttctatagacaatgatagacacatctgttttaataatacaaatgggatcacactatatatgctgttcctgaacttgatttttgtaactaacaatatattagagatattttcccaggtctatacatattaatatgtagggtgatctacctcattcttttgtatagagtatttcattacatggctgacccataatttatttaactctctgtctacatacagttcaacctaaaaatctaaagaaataaccttttaaaatcttttttcaaaaaaagtttacattcaaggagacacgtgcttgtttgtgagatgggcatattgcacactggtgaggagtgggcttccaatgcacccgttacccaaatagtggacactgcatccagtaggcagttcctcaacccttaccaccctcccagcctttggggttccctgtgtctgttatttccatctttttttttctttttctttctttttttttttttttttttgagacagagtctcgttctgtcacccaggctggagtccaatggtgcaatctcagctcactgcaacctccgcctcccgggttcaagtgattctcctgcctcagcctcctgagtagctgagactacaggcacccaccaccatacccagctaatttttgtatttttagtagaaacaaggtttcaccatgttggccagactggtctcgaactcttgacctcaggcgatccacctgcctcggcctcccaaagtgctgggattacaggcatgagccaccatgcccggccagttatttccatctttatgaccatgtgtacccataaaaatcatttctatagtaagtataacccaagttattttttaaatgaatgtagtaactttgcaaagcatttgtatgtagtaaaacaatggaaatgtcatttcggttatcattttctttctttttttcactatatggagcttgatagttttaactccaccagttagaatagagttttagcatcttttttattcatttgtcagaagagcagaaacaaatactttataacatttttgttataaagtaacaaaaacaatcttcataacattctcttaagtaccatttatggtacaacaattgaaattattaaagttcctgggacatttctatggatttcccatctcttacgaataaccccgtgttattcttcagctacaggagagggtggggtgcgtggggctggggcagaagcaggagatcacttgggaagcgccatagcatcgtgggtgggtgatggggctggcccaggggtaacaagggtagagccccaataggttttgcaggtaggattgacaggatgtggaggagaggagccaggcatagctctgacatatttggccttagcaatgccaaaggtgggactgtccttgcctggtaccacaaaaaccacagcagaaataagtttgggggtgaggaggtaatgagggattctgttttgaccagaatcagcttattttattatgtacgtattatttatatggggacaggttctcactctgttgcccgggctactgtgcagtggcatgatcacagctcgttgcagcctcaacctccagggctcaagtgatcctcccccctcagcctcccaaagtgctgggattacaggcatgagccattttatttttttttatttatttattgtttttagagacgggcttgctatgtcgctcaggctggtcttgaactcctggcctccagtgctcctcccacgtcagccactcaagtagctggaattgcagacttattttagattgaatgcttttcatttttctctttttgaaacaccctgtggttcatgttcttactcagagtaacagtccatgtccccatagcagcccacaaggcaccacgtggccccggctggcctgtccagtgctctcccctccgtccgctcgtcctctgcatgctggcctccctgtcatttctagaacactcaggcattctcttaagccaaggcctttgtagttgtgattccctctgcatggaatgctcttccccagccatctcctgtcactctctcacccaccccatgaggtcatgaccacgctatttagattgtcacaccccatctcctggattgcagatgagatgatatgcaatgtgctttttaaaaagactactatggacaatgtctaacatataccaaagtagagacaaatttaatgtgcttccatattcccagcacctgcttcagtagtcaacagtagctgaccctgtttcatcctcacttctacccattgtcccattattttgaaatatttgatccccagacgtcctattgtttcattcataaatcttcatagtggcttacttgtttatggttgattcgccagccccactcccttccatagcagcctagtaagggtagggatgtgggtttggatgcgttttgctcattgctgtgtatccagcatctagaacaatgtctggcacctcgtagctacttatcaatatttattagatgaataattaggtcaagtttgatgaagcctgaagattgaactctggctttaatacaagaggggtattaaatgttttgactgcagctgtttgagaggggctgggaatgctgaaaagcctaattggaatagttgaggagagaatggggaaaaggaatcagaaatagcgattatgcacaacagctgatacaggggaacagaaaataggacatctgagatcaagagagagctttctttaagagggtagatattatagcctgtctgtgtgcccctgggaatgatcaggaaagactgaaagcgatgatgccagacagagggcagctcctggagtgatgtcaggaagtccgtgtggtggtgctctgtcgctgcataacaaactacccactacttagaggtttaaaaattaaaagcaagttagctcacagtttcagtcgatcaggaatccagcttagcagggtgattctgtccaagttcctcctgagggtacagtcatctaaaagcttgtccggggctagaagaaccctcttccaagcttccacacatggcttttggcaggcggccattgttccttgccacatggcctctccacagggctgcttgaatgtcctcacagcatggctgacttcccccagagcaagccatccaagagagcaagagactaagatgggaaccacagtgtcttttgtgacctagtattagaagttgcatgtcatcccttactctgatttgttagaagggagtcactaagtacaaagtagggtggccagacatccaaataaagataaacaaaggcttattagtataggtgtattccaaatattgcatagggaattcttacactaaataatgactttatctgaaactcaaagttaatgtatgacctgtatttttatttgttagatttggcaacttcagaaggaatttgtggacatacttttaaactacggctagccaaagggaatgggatgtagtgcatatgtagagctcaggcctacagaaacacggcagatcatagggagagggctggcggagtacttggcaaatgtagataggtaggcgggtgggtaggcagaggcagtgaggggagcaggtggacatgctcttctgattgcttctcttttctcaccggagtaagcagcaaggttatgggcaaggtaaccttctcccgccccgccatacaccttgcacagagcttacccttgactcagaccctccatgctgggggaattacctccctgtgaccatcctaggaagacacctcttggctcttgcagagtcagaaaagcacaggacatggagttgagaaacccggtttcttctttttcttctttttcttttttttgagatggagtctcgctctgttgcccaggctggagtacagtggcacaatctcggctcactgcaacctccacctcccgggttcaagtgattctcctgtctcagcctcctgagtagctgggattacaggcacacgctgccatgaccagctaattttttgtattttagtagagatggggtttcactgttgttgcccaggctggtctcgaactcctgagctcaggcagtctacccaccttggcctcccaaagtgctaggattacaagtgtgagccaccgcacctggcctgctttttcttttccctgttatggcctctctgggtttccaaaattctatctcttttttctcttttttttttttttttttttgatggagtctcactctgtcaccaggttggagtgcagtggcacaatcttggctcactgcaacctctgcttcccaggttcaagtaattctcctgcctcagcctcccgagtagttgggcctacaggcatgcatcaccacgcccagctaatgttttcgtatatttagtagagacagggtttcaccatgttggccaagatggtttcaatctcctgacctcgtgatccacccgcctcagcctcccaaagtgctaggattacaggcgtgggccacctcgcctggcaaaatttttttttttttttttttttttttttgagacagtgtctcactctgtcgcccaggctggggtgcagtgacgcgatcttggctcactgcaacctccgcctcccgggttcaagtgattcttgtgcttcagcctccctcaatgttttttttactttgtcccacagtaagaaatccatttgacatcatggtgcagaatacacgtacatcaaaggtattagaaaattgttatcttgcatcatacaaaggacgctgttatttttctatccagtcctgctctagttcctttacacctccccccaaaaaagttcacacccattactatggttccaccacccactaatgagggctccaaccccgagttgagaatcactgcctactaccctaatcaactgatggcattcttgcaggagtatgttgacaaagcccatactgaaatgtgtcccccaaatgtgtaattcttcctattgtaatgtgataaattgtgtaatgaaacgttttgctggagttttatgagaattttttttgactgaagacacgagatgagtttttaattatttttttcaaagctctattttcagcataaattaagtacaaaatatattttatggaatagttatagggttttttaggaaaatttaaaagattttgtggttctttctaaggaaaactttcaatgtgttaaaaacctatccagggcctggtgcagtggctcacgcctgtaatcccagcactttgggaggctgagacaggcagatcgcttgaggccaggagttcaagactagcctggtcaacatggtgaaaccccatctctactaaaaatacaaaaaaattagccagatgtggtggcaggtgcctatagttccagctactcaggagactgaggcaggagaatcacctgaacctgggaggcagaggttgcagtgagccaagatcgcgccactgcactccagcctgggcaacagagcaaaactccgtctcaaaaaaataaaaaataaaaacctgtccaggttttttgtttgataaattttgtttttgaaatgattttcaaacctaactttacccatgtagccatgaagttaaaacaaaatcctagagtttatgctgtcattgtaagcaattacagatgatggccattacaaaacttcattttactctttgtggaagactagtctccatttcatatgcaatagaagattcaactctcttttgcacttgagaatactaaaagtaaatgtattttagtaaagaaaaaaaacccacatgtaaatgaatgtgtgtcttggagcaactgaattctattcaaaactttggaaggaaacagcaaagtgttagaatacgtgatttttaaagtgtatgtataaataaataccgtgagtaaatatttgcttatttctttgacatccctaaaaagtttatatatacaagttggcataattttttttcttccccttgggaaatagtgtaattgcctttatttggagtttccttatattaaccatttataattatagtagcttgatttaggacattacacatctctttgaacgtggggaaattttcagtcctgaaaatttttatcttacaattttttttattaacgtgtacattttccaaaattaatgcaataacaaatctgacagttaatatttgaaagaactattttggccagcatgctgcctcctactcaaaacatctgatgttccccatgagcacatactgggtgaatggaaacttctaagaaaatgtcagtccttacccttggagataggacggcctgaggcaggagtgtcaggagggacacaggtcaccatgctggtgcgggctccgggtgtgcagctccctgcagggggtggaaccctccccactccctgggcatcctgcccaatgagagtcccagatgcacatcttaatgcacgaggaagttattattctctcactgttgtcagttgcagaccctgtttgtgactattctgtaaacccagatggaacttcaaagcggtagggtggagggaggccaactatatttttctggtagccttaggtttctttccaatgtaggacaaaatcacgaatctcagcctctcaggatttgagggatcttctagttgaactggctgagacgcctacctgattggatttcccgagttgccttctctcccatttcagatgatctcattgtgagttgagatttggagaatcaaaacctccctccccgccctttccctagcttcctcctgcccttgctaggtctgccttccagggttctgcagaactgctctgatttctcctggcgctcccttctctgtccccatttccctctgcacatcacccctttccttgctgggacccacctccagtcccctccactcaccactcaagctcgtgggagaggaagctcatctcctgatctccagccttgctagcctccctgggagcttcgacacggcctccatttccctcttgtcctcggcctccttggtctctgccgactcctcatcctcacccacgcaggtgttaacatgctccaggatgtcttctttaagcctgtcactcttccttccatagtgtcacctctcttcagtgtcccagagctgcctcccagatagcctctgggcctttcatctgggtggccgctggcaccttgagttccacatgctcaaagcaaaactcatccaccccatcccacccacccgaacacttgctgctactcctcattcgcccgtctatcaacctgagccagaagtcacagttcctgcaagcactacttatcgagcactctgcagttgactcagcaaaaagagccgtttacttgagtttatgtttcacgggggagacagacgatgcatccagtagacacaatgcaggccacacgagccattgggcaggcaggagagctgggagggcagggctg

SEQ ID NO: 57 - DNA, 5196 bp, Homo sapiens
ttttcaagagatagggtcttgctgtgttgcccaagctggagtacagtgttagtcacaggcatgatcccattactggtgagcatgggagttttgacttgctccatttctgacctgagccgcttcacacctccttaggtaacatggtggtccctggctcttgtggggtcaccatattgatgccaaactgaggacacccaacgctcgttgcgtgctacagccaagaactcctgggctcaagtgattctcctgcttcggcttcactagtagctaggacaataggcctgcaccaccaagccaagccagagtctgtgatctaaccattctattatgccacctttcccaaagatgtttacagtttttcttaactgtaaccagtgtagaaaattaaaaatttgtggaggatcttaaatttgaggacagagttaaggaatatatccctacgtacatggctaaatgtaaatatgtagcaatgcctaatagaggccaggcactgttctggtactctgggtaggggtggatggggtggatagggaatataaggacaaatgatatagggtccacgaagaactctcaacctaattctgatgcaatgtggtgttggtatttgagagtttccaaaatgttgtgggtaggagagcaaaacaataatatttgggttttagaaagtaaggcataaaataatttgttcattaaatcaaaggaagtaagaagatcacttgggaaagttataatccaaaaatagttaagtatttgagtttcagcaggaggaatgaaaacagattactttaaggaaatatttcataattagaaatatccaggtttagatactgaaagtgagggccagagataggaatgggttgaagatgacgccacagtcttcttttttttttttttttttttttgagacggagtctcactctgttgcccaggctggactgcagtggcacgatctcagctgacggcaacctctgcctcccgggttcaggcgattcccccacctcagccttcagagtagctgagattacaggcgcgcgccaccaggcccgactgatttttgtatttttagtagagacggggtttcaccatcttggctaggctggtcttgaactcctgacctcaggtgatccgcccgcctcggcctcccaaagtgttaggattacaggcgtgagccaccgcacccggcctacagtacttctaacgtaacatcgcagaaacactggaggagagaagagaatacacttccactcggaattcgcaccctggtcgccttcattcgctgggttcactcgctgaactgcctcgcccccgcccgggaggatgacatctcggcctgggcagagactcgaaagcctcctcctgccgctcgggatgctaacagcagggagagctgtgtctagtttttttttttttttttttttttttgagagggaatctcgctctgtcccccaggctggagtgcagcggcgcgatctcagctcactgcaacctccgcctcccaggttcaagcaattctcctgcctcaacctcccgtgtagctgggactacagatgccggccaccacgcaaggctaatttttttgtatttttagtagagacggggtttcaccatattggtcaggctggtctcgaactcccgacctcaggtgatccgcccgcctcagcctcccaaagtgctgggattacaggcgtgagccaccgcgcccggcttgtgtctagtcttgcccgtagcagcgtcgccgacagccacgccgggttgtcagagcctcactagtttttctcccggccgccgctcttcccggattcagccaccttccctcttccgggaacttgcccgcgtgttccggctccaggaagtgcgtcatcagtcggcgccagcggccgcacgccgcggagcaggggctcggaggtcccgggattacggtgctcgagcacgctggtgggaaaggacccgggacttgaacagtgttgtgcggcgccatgcaggtctccagcctcaatgaggtgaagatttacagcctcagctgcggcaagtcccttcctgagtggctttctgataggaagaagagagcgctacagaagaaagatgtagatgtccgtaggagaattgaacttattcaggactttgaaatgcctactgtgtgtaccactattaaggtgtcaaaagatggacagtacattttagcaactggaacatataaacctcgggttcgatgttatgacacctatcaattatccttgaagtttgaaaggtgtttagattcagaagttgtcacctttgaaattttgtctgatgactactcaaagattgtcttcttacataatgatagatacattgaatttcattcgcaatcaggtttttactacaaaaccagaataccaaagtttgggagagatttctcttaccactatccatcctgtgacttgtactttgttggtgcaagttctgaagtttataggttaaacttagaacaaggacgatacctgaatcctctacaaactgatgctgcggagaataatgtttgtgacataaattcagtgcatggcttgtttgccacaggaaccatagagggtagagtggagtgctgggacccaagaactcgaaacagagttggcctgttagactgcgccttaaacagtgtcacagcagattcagagataaacagtttaccaacaatctctgctttgaaatttaatggtgccttgaccatggcagttggaacaaccacagggcagggaaaaatatttacttccttggagccagagcatgaccttaatgatgtttgtctctaccccaactcaggcatgcttctgacggccaatgaaacccccaagatgggcatctattacattccagttttgggtcctgctcctcggtggtgttccttcttagacaacttgaccgaagaattagaagagaatccagaaagcacagtctatgatgattataaatttgtcaccaagaaagaccttgaaaatttagggctcacccacctcattggatctcctttcctccgggcatatatgcatgggtttttcatggatataagactctatcacaaggtgaaactgatggtaaatccatttgcttatgaagaatataggaaagataaaatacgacagaaaatagaagaaacacgtgcacagagagtccagttaaagaaattgccaaaagttaacaaagagctggcacttaaattaattgaggaagaagaggagaagcagaaatctacatggaaaaagaaagttaagagtcttcctaatattctcaccgatgatcgatttaaagttatgtttgagaaccctgacttccaagtagatgaagagagtgaagaatttaggcttctgaatccacttgtttcaaaaattagtgaaaaaaggaagaagaaactaagactcttagagcaacaagaacttcgtgaaaaagaagaggaggaagagccggaaggaaaaccaagtgatgcagaaagttcggagagttcagatgatgaaaaagcctgggttgaagaggtcaggaagcaacgcagactcctccagcaggaggaaaaagtgaagcggcaggaacgactcaaggaggaccagcagacagtcctaaagccccagttttatgagatcaaagcaggagaagaatttagaagcttcaaagattctgccacaaagcagaaactgatgaacaaaacccttgaagatcgtttgaaaattgaagcaaaaaatgggacattgagtgtatccgacaccaccgttggcagcaaacaattgacattcacgttaaagaggtctgaacagcagaagaagcaacaggaggctgagaaactgcatcgacaagaaaggaaaagactccgtcgttcggccggacacctgaagtcaagacacaaaagaggacggtcgtttcattgatttgggaagtggtcctacctgtgattagggaggggtacgtctcccccaaactgatcatcgttagggtgttaaacacagacgaggaaacacacgtttttaaagttcatgtacgttcttgtacacagaggtaaagatttgaaaacctgtgccttgtgggttggactttgaagctggccccgccgacggccaccgcacagccccaggggtgtgcttgcgagtcgttgctccctggaaacattgtcctttccccacggctttaatcatgaaaaccaggctggggtttttttaatattgtgaaatgtacaccatgaaatgaaaggtttatcctgtgccagaaaccaaggtttatcatgctctaggaacttttttcttacactgcctaccgccattcatgattaaaccatccagaaataccatccctgttttacctggtgtctgtgtattgcctgtgtttgtgtttataagtttatgctgataggtttgttcggcttgtttatgtattagtttgggatttgtttttaaataatttataccaagagagtataatctaatggtgcaggttgagagcatcccaaatccgaaaatctaaaactgtttgagcactgtatttatctgttcttgcactgctataaagaactacctgaaactgggtaatttataagtaaagaaaagaggtttaattgactcacagttctacaggtggtacaggaagcatggctgtggaggccctgggaagcttacaatcgtggcagaaggtgaagcggaagcaggtatgtcctgcgtggctagagccagaggaggagggcaaaggggcagatgctgcacactttcaaacaccagatctccaagaactcactaacacagaatagcaagggggaagtctgcccccatgtttcagtcacctccctccaggcccctcctccaacaccgaagattacaatttgacatgagatttgtgtggggacacagagcaaaaccatatcaagcactgacatgacattggaggaaaatgctcattagagcttttcaggttttggattttcagatttgggatacttgactagtaaatataatacagatattccaaaacacacaaaaaaaccaaagtctaaaagacttctggtcccaagcatttcagataagggatacccaacctgtaataatgggaaacaagcagtagaggctgttggttaatcttggcacaagtttaattacaggttttttttttttcctgtttcttaagtacagtcaaacataaacttactggaggaaacatttataaaaataaatatactttcatttg

SEQ ID NO: 58 - protein, 638 aa, Homo sapiens
MQVSSLNEVKIYSLSCGKSLPEWLSDRKKRALQKKDVDVRRRIELIQDFEMPTVCTTIKVSKDGQYILATGTYKPRVRCYDTYQLSLKFERCLDSEVVTFEILSDDYSKIVFLHNDRYIEFHSQSGFYYKTRIPKFGRDFSYHYPSCDLYFVGASSEVYRLNLEQGRYLNPLQTDAAENNVCDINSVHGLFATGTIEGRVECWDPRTRNRVGLLDCALNSVTADSEINSLPTISALKFNGALTMAVGTTTGQGKIFTSLEPEHDLNDVCLYPNSGMLLTANETPKMGIYYIPVLGPAPRWCSFLDNLTEELEENPESTVYDDYKFVTKKDLENLGLTHLIGSPFLRAYMHGFFMDIRLYHKVKLMVNPFAYEEYRKDKIRQKIEETRAQRVQLKKLPKVNKELALKLIEEEEEKQKSTWKKKVKSLPNILTDDRFKVMFENPDFQVDEESEEFRLLNPLVSKISEKRKKKLRLLEQQELREKEEEEEPEGKPSDAESSESSDDEKAWVEEVRKQRRLLQQEEKVKRQERLKEDQQTVLKPQFYEIKAGEEFRSFKDSATKQKLMNKTLEDRLKIEAKNGTLSVSDTTVGSKQLTFTLKRSEQQKKQQEAEKLHRQERKRLRRSAGHLKSRHKRGRSFH

SEQ ID NO: 59 - DNA, 5346 bp, Homo sapiens
ttttcaagagatagggtcttgctgtgttgcccaagctggagtacagtgttagtcacaggcatgatcccattactggtgagcatgggagttttgacttgctccatttctgacctgagccgcttcacacctccttaggtaacatggtggtccctggctcttgtggggtcaccatattgatgccaaactgaggacacccaacgctcgttgcgtgctacagccaagaactcctgggctcaagtgattctcctgcttcggcttcactagtagctaggacaataggcctgcaccaccaagccaagccagagtctgtgatctaaccattctattatgccacctttcccaaagatgtttacagtttttcttaactgtaaccagtgtagaaaattaaaaatttgtggaggatcttaaatttgaggacagagttaaggaatatatccctacgtacatggctaaatgtaaatatgtagcaatgcctaatagaggccaggcactgttctggtactctgggtaggggtggatggggtggatagggaatataaggacaaatgatatagggtccacgaagaactctcaacctaattctgatgcaatgtggtgttggtatttgagagtttccaaaatgttgtgggtaggagagcaaaacaataatatttgggttttagaaagtaaggcataaaataatttgttcattaaatcaaaggaagtaagaagatcacttgggaaagttataatccaaaaatagttaagtatttgagtttcagcaggaggaatgaaaacagattactttaaggaaatatttcataattagaaatatccaggtttagatactgaaagtgagggccagagataggaatgggttgaagatgacgccacagtcttcttttttttttttttttttttttgagacggagtctcactctgttgcccaggctggactgcagtggcacgatctcagctgacggcaacctctgcctcccgggttcaggcgattcccccacctcagccttcagagtagctgagattacaggcgcgcgccaccaggcccgactgatttttgtatttttagtagagacggggtttcaccatcttggctaggctggtcttgaactcctgacctcaggtgatccgcccgcctcggcctcccaaagtgttaggattacaggcgtgagccaccgcacccggcctacagtacttctaacgtaacatcgcagaaacactggaggagagaagagaatacacttccactcggaattcgcaccctggtcgccttcattcgctgggttcactcgctgaactgcctcgcccccgcccgggaggatgacatctcggcctgggcagagactcgaaagcctcctcctgccgctcgggatgctaacagcagggagagctgtgtctagtttttttttttttttttttttttttgagagggaatctcgctctgtcccccaggctggagtgcagcggcgcgatctcagctcactgcaacctccgcctcccaggttcaagcaattctcctgcctcaacctcccgtgtagctgggactacagatgccggccaccacgcaaggctaatttttttgtatttttagtagagacggggtttcaccatattggtcaggctggtctcgaactcccgacctcaggtgatccgcccgcctcagcctcccaaagtgctgggattacaggcgtgagccaccgcgcccggcttgtgtctagtcttgcccgtagcagcgtcgccgacagccacgccgggttgtcagagcctcactagtttttctcccggccgccgctcttcccggattcagccaccttccctcttccgggaacttgcccgcgtgttccggctccaggaagtgcgtcatcagtcggcgccagcggccgcacgccgcggagcaggggctcggaggtcccgggattacggtgctcgagcacgctggtgggaaaggacccgggacttgaacagtgttgtgcggcgccatgcaggtctccagcctcaatgaggtgaagatttacagcctcagctgcggcaagtcccttcctgagtggctttctgataggaagaagagagcgctacagaagaaagatgtagatgtccgtaggagaattgaacttattcaggactttgaaatgcctactgtgtgtaccactattaaggtgtcaaaagatggacagtacattttagcaactggaacatataaacctcgggttcgatgttatgacacctatcaattatccttgaagtttgaaaggtgtttagattcagaagttgtcacctttgaaattttgtctgatgactactcaaagattgtcttcttacataatgatagatacattgaatttcattcgcaatcaggtttttactacaaaaccagaataccaaagtttgggagagatttctcttaccactatccatcctgtgacttgtactttgttggtgcaagttctgaagtttataggttaaacttagaacaaggacgatacctgaatcctctacaaactgatgctgcggagaataatgtttgtgacataaattcagtgcatggcttgtttgccacaggaaccatagagggtagagtggagtgctgggacccaagaactcgaaacagagttggcctgttagactgcgccttaaacagtgtcacagcagattcagagataaacagtttaccaacaatctctgctttgaaatttaatggtgccttgaccatggcagttggaacaaccacagggcaggttttattatatgaccttcgatctgataagccattgctagttaaagatcaccagtatgggctgcccattaagtccgttcatttccaggattcattagatctgattttgtctgctgactctcgaattgtcaagatgtggaataagaactccggaaaaatatttacttccttggagccagagcatgaccttaatgatgtttgtctctaccccaactcaggcatgcttctgacggccaatgaaacccccaagatgggcatctattacattccagttttgggtcctgctcctcggtggtgttccttcttagacaacttgaccgaagaattagaagagaatccagaaagcacagtctatgatgattataaatttgtcaccaagaaagaccttgaaaatttagggctcacccacctcattggatctcctttcctccgggcatatatgcatgggtttttcatggatataagactctatcacaaggtgaaactgatggtaaatccatttgcttatgaagaatataggaaagataaaatacgacagaaaatagaagaaacacgtgcacagagagtccagttaaagaaattgccaaaagttaacaaagagctggcacttaaattaattgaggaagaagaggagaagcagaaatctacatggaaaaagaaagttaagagtcttcctaatattctcaccgatgatcgatttaaagttatgtttgagaaccctgacttccaagtagatgaagagagtgaagaatttaggcttctgaatccacttgtttcaaaaattagtgaaaaaaggaagaagaaactaagactcttagagcaacaagaacttcgtgaaaaagaagaggaggaagagccggaaggaaaaccaagtgatgcagaaagttcggagagttcagatgatgaaaaagcctgggttgaagaggtcaggaagcaacgcagactcctccagcaggaggaaaaagtgaagcggcaggaacgactcaaggaggaccagcagacagtcctaaagccccagttttatgagatcaaagcaggagaagaatttagaagcttcaaagattctgccacaaagcagaaactgatgaacaaaacccttgaagatcgtttgaaaattgaagcaaaaaatgggacattgagtgtatccgacaccaccgttggcagcaaacaattgacattcacgttaaagaggtctgaacagcagaagaagcaacaggaggctgagaaactgcatcgacaagaaaggaaaagactccgtcgttcggccggacacctgaagtcaagacacaaaagaggacggtcgtttcattgatttgggaagtggtcctacctgtgattagggaggggtacgtctcccccaaactgatcatcgttagggtgttaaacacagacgaggaaacacacgtttttaaagttcatgtacgttcttgtacacagaggtaaagatttgaaaacctgtgccttgtgggttggactttgaagctggccccgccgacggccaccgcacagccccaggggtgtgcttgcgagtcgttgctccctggaaacattgtcctttccccacggctttaatcatgaaaaccaggctggggtttttttaatattgtgaaatgtacaccatgaaatgaaaggtttatcctgtgccagaaaccaaggtttatcatgctctaggaacttttttcttacactgcctaccgccattcatgattaaaccatccagaaataccatccctgttttacctggtgtctgtgtattgcctgtgtttgtgtttataagtttatgctgataggtttgttcggcttgtttatgtattagtttgggatttgtttttaaataatttataccaagagagtataatctaatggtgcaggttgagagcatcccaaatccgaaaatctaaaactgtttgagcactgtatttatctgttcttgcactgctataaagaactacctgaaactgggtaatttataagtaaagaaaagaggtttaattgactcacagttctacaggtggtacaggaagcatggctgtggaggccctgggaagcttacaatcgtggcagaaggtgaagcggaagcaggtatgtcctgcgtggctagagccagaggaggagggcaaaggggcagatgctgcacactttcaaacaccagatctccaagaactcactaacacagaatagcaagggggaagtctgcccccatgtttcagtcacctccctccaggcccctcctccaacaccgaagattacaatttgacatgagatttgtgtggggacacagagcaaaaccatatcaagcactgacatgacattggaggaaaatgctcattagagcttttcaggttttggattttcagatttgggatacttgactagtaaatataatacagatattccaaaacacacaaaaaaaccaaagtctaaaagacttctggtcccaagcatttcagataagggatacccaacctgtaataatgggaaacaagcagtagaggctgttggttaatcttggcacaagtttaattacaggttttttttttttcctgtttcttaagtacagtcaaacataaacttactggaggaaacatttataaaaataaatatactttcatttg

SEQ ID NO: 60 - protein, 688 aa, Homo sapiens
MQVSSLNEVKIYSLSCGKSLPEWLSDRKKRALQKKDVDVRRRIELIQDFEMPTVCTTIKVSKDGQYILATGTYKPRVRCYDTYQLSLKFERCLDSEVVTFEILSDDYSKIVFLHNDRYIEFHSQSGFYYKTRIPKFGRDFSYHYPSCDLYFVGASSEVYRLNLEQGRYLNPLQTDAAENNVCDINSVHGLFATGTIEGRVECWDPRTRNRVGLLDCALNSVTADSEINSLPTISALKFNGALTMAVGTTTGQVLLYDLRSDKPLLVKDHQYGLPIKSVHFQDSLDLILSADSRIVKMWNKNSGKIFTSLEPEHDLNDVCLYPNSGMLLTANETPKMGIYYIPVLGPAPRWCSFLDNLTEELEENPESTVYDDYKFVTKKDLENLGLTHLIGSPFLRAYMHGFFMDIRLYHKVKLMVNPFAYEEYRKDKIRQKIEETRAQRVQLKKLPKVNKELALKLIEEEEEKQKSTWKKKVKSLPNILTDDRFKVMFENPDFQVDEESEEFRLLNPLVSKISEKRKKKLRLLEQQELREKEEEEEPEGKPSDAESSESSDDEKAWVEEVRKQRRLLQQEEKVKRQERLKEDQQTVLKPQFYEIKAGEEFRSFKDSATKQKLMNKTLEDRLKIEAKNGTLSVSDTTVGSKQLTFTLKRSEQQKKQQEAEKLHRQERKRLRRSAGHLKSRHKRGRSFH

SEQ ID NO: 61 - DNA, 83493 bp, Mus musculus
  misc_feature (1)...(83493): n = A,T,C or G
aacaaatttgacaagatgtgattacaggtaacttattacatgctttggataaatgttaagtagtgaaggaaaacaggtacctctttctctaggactcatactgaagggaagaaacttcttcatggacagattcatctaagagcccttgggcacaggaagtgtctaaatgggattctgagaaggaatcctataatgcaaagggcaatcagggttaaataaaatcagctccaacctttatcttacagcctttgagaaatcaaagaatttcatgtccctacctctgtcaccaacttctgtggcttctgtcctgagcagggcaaatggactctgaattctgtcacagtgccttaatcactttgccatctcctgcccatggttagtcagtgctgaccatcatgtgacccagttcctgtctttggtttatttatgtcctcaaagcagttgaaaagtgttggtgtgtgtagaaaacaattaaagtttgggacaatggagagaaactcatataaaatataagtaatctaatactgaataggcattcttgttctaaaagtaatttgatttttttatgtgtgtttgttgtttgattctcaagacttagtttctcagtgtaaccttggctgttgtcctggaactcgctctgtagaccagactggccttgaactcacagagacctgcctgtctctccctccaagtgctgggaataaaggtgtgcgccaccatgactgatcatattaaaggttgttcttgctgacatcatcccatctaataaacacagaaggaagggtctgcatcaactttcaccatggcaactgcttcaggtgggaatcagcaatagttagcaaaagctatgtgttttatttatttatttatttatttatttatttatttatttatttattttgagacggggtttctctgtgtagccctggctgtcctggaactcactctgtagaccaggctggcccaaaactcagaaatctgcctgcctctgcctcccaagtgctggaattaaaggcatgcaccaccactgcctagcaagctatgtgtgaaagtataagaggtgggctatttataggttttaaaatacacaactacaaagggaagaacattcactttggtaaagctatcaaggctgtagtagataaagacagaagaactactttaggttaaagaaggacgaatgccatgaattatcctggatagggtcttagaacaacaacaacaacaaaaaaatcaaaaaacaaaaaacaaaaaatccaacccccccaaaaaaccctacaaaacaaaacaaaaactccaaccaacaaattaaccaaaaccaaaacaaaaaccaaaaaaccaaaaaaaaaaaaaaaaacaaaaaacaaaaaaaaaatcacaaaacctaaaccaaaccaaatcaaaaacactttaaaaaaatataaagaacattagagagaatgttctggtttgaatgcaatgtataaggtagataatcaacactattgtgtcagtatcaattcctgatttctgtcatcacgaggaaatgatggaagagtatgtctcagctcagagaaactactgtgtactgaagtcatttacagtggagaaggtaaaagggcaaacaaaccgcacccttaacttagtctcaaaagctttagaagaacatgggtagatgggaattctttataatattttgccattttcctttgagtctgaaacgactatgagataaagtagttccacctgtgcatgcggtgactgtgcacttctctgctcctctgcttgcccctgtcaccgtggccgagcgatggccctagagattgtcatactgctctccctgtctaaatgaccttgtgctgttgtttgagatgagccctctctcttgttaggctgctgcaatgagggcacccaggagcttccttcactgattcactcacatctaccgaaggtgtagaaagtagaatagtgcagagagaagaaagagactgctcatagggtgtgtgtgtgtgggggggggaagaactagcagggaaattaaggatggaccatacggggcatctggcaagaggagaacctcccgagcgtggcatgcaaagttaagaagcagaaaagaagatccaagggggaagaaagatgtttgggaatgggactcttcctggccattttccctttcaccacactggtcacttttgtgaatgtctggtcctaattccttggccagatagcagaactagtgtggttgtcagtacagaagagtagagaacatctgggctgatatagagacactcaaagggtatttagtggggtatatgagaatcaaaatgggtaacaatcacagtaacagcagcagctgatacaggattcccatcttgtccttcggactagtccacaaccttagtggctttcattttgttcaatctacacaatgtgatcagtgttcctatttcagagtagactgagacacaacgaggttaaggcaacggccatctgcccgctacagaaacaagcttcagactctaaactgaagcccaagggaatcccaaggaacccctttagacctagcacactccactcacgtttagctactcacttttatgaccaatcttagagatcatgtaactaagggctatgttattaatatccagcagctttgctgcacatgacctgtgctgtgtgagagtcaaaagggaaaacttggcttcagttttttattttagaatttggaggtcatttctcaaatcagtagaaactagtggtcccttctctgggcctgtgcaaagtggaagaccccttgatacctgctttttgatcttgcttatgccatcattttctggacatgtgtctcatgaagagcaaggatgtttgattatgcacgcgttgacccctgacttccttactttccctgacctctaacaaaccaccttcccccgtgcttcctgcccgtcctgcttctttttcccctgaatagtgctgagtcccacttgagggattcagtatgattgaggcttcctttctcatctccatccataactgttgtatcatttattttctcattgctaggacaaagtgcctgagaagtggaacgtagtttctttcggctcacagtccttaaagcccagcacggcaagggaggcatggcggcgggagtgtatggagcctggtcacgtgggatctgtgatcaggaatcagaaagacagatgctcctgttgctcattcaatctgggacccgaggtcatgggacagagccgctcacatgcaggatgggtcttccctcctccgttaagcctttcccggaaacatcctcacagataaacacagcagttcatctccagggtgcttctaaacccccgtcaaggttaagagtcacgacggacttctacatcagccctttctcttttgaaacactccttgcttcagtatagagccctgagggatgagcagaacaggcctgatccaataactgaagataactctttgatccttcttttgttctcatccttctcttccctctccagcaatctatgatggcaaaatcagagtcccagaaagcatggaccttctccgttgggttgtggatctgctctccggaacgtactttgggcagagcagggcaggagaggcctggcagagaggatgaagcaggttggcccgtgacccactggagcttcatgggaaggatgaaattgtcagtgtctgatggcaagagaaaactgtggctcagaagggcactgctcacctcccctggttagagttcccctgtagccagtgtgggggaggcacctggcgaggtgtagggcacagtgggtcccatagcccctgtcctcagccctcttcagagccttgcctctcacctgtgaggtgatggagaaggagatgggagatgggtcaaagcagggattcccttgggggcctctctgacttctttcttattttaggaggagtaggcagcaagttccagaatgtctggaacatgaaaaagagacttaataaatacactttcaaacccgagactcagctcctggccaggagacatgcaaacgttttaatatccttgttctgcatttacttaaatggaaacagcccgtggtatttttagctgctgtgtaatcaacgtaagaaggaaaggggaatgtatactttttttccttctcctagttagagtaagagaatgaattgctcaattctcaacagagtccaggaagggaggaaaatcccggagtcccattgattggctcctcctctgtcatagccttgatttaaacccagggagggaagcagagggagaagatattgagggacggatcggcaacgaagtctccagtaccaggaccagctcacaggaggcagggggattggaagtggtgcccagcagcctcccaggtaagagtgccagctccttgaggctttatcatcgattgggagggggacagtcagtgtggggaagattgtagactgacgtgcattgttgcaaatctaggcaaggcaatatagattaagttcaaactatctcccagggcctgtgaatcatgtccatagctggtatcagactctgccctccccaagccaggagacaccatccccttacctgccaagctcagtgcgtggggcaccagattctacgcggagcagtgcattttagatgatgtgttttctttaagtctatttgtgtttcttcttacacagacctcttctctccgtgtaatctcttatgtgctatagctcgttgttctcttaaaacagagctttcaatctggctgtgtttaggaagctatgcctaactttcccctctttgagatttttgtgtgaaccgatgaagatgatgcttgccgactccctcgaaggggctcattgagttgtctgtgttttaatcattacatgacagaggagactttctcttcccctactgcactatggttaccctcacagtgcctcaaagcgggcattttcaatcacttcaagagtgatgtgggacactggtttttgaagatctgagtttttatttgtaatttttgtagggtgggagagggctgggtgaagagggtagagggagagtcttcaccctctaaggaccagattagcttatataagcattgacagaatcataacttcaacatagaaatatcagattatccacatctgtgcaggtaagccatggctctgcccagttgcagactcagggtgatggtgacagtgtcaagagaagactcaagaggagggagagagtatcaatacccgggtcctttccctcagaaacaaaggagaaacagggcctgactttctctcatgctactctgaattcttttaatgtcttcaaagcaaagaaactgggcagatgatttccatcccatcttgtggcttctggctttcactctggtgccgtgctgtagggtagaccagctccttctgaggaaattatacccaggcccatggaaactctgccccttccagagccctggctcccataggctctggctgcagacatgaggtcatagtttaggttctgttggagcatttggaaccaccagtctgcaagctgatggtgttgtggtatcaggcctggctcctgatggtcagcagctcggcctggttccaccccagacgactcaggcagatgccagccagctgccatctaaatatgtgcatagcccatgtaggcagaacggcgcaaattcctggaaattagcattggctcttcagcttgatagaaggctggaactctaaagttgtttcagtgtgtggaaaaccacattaaactgaagggagaaattgtaacttctcattatgcatctctcctcattagcactcacctgaagcaagtccccatcgtggctgtggagaatagaaataattgtaggtcagcaaacactttatcattttgggggactcggttggtaaaagaaggttctcaaatttagatctcgtgtctattttatctccccattgtgggtgagcctggactatggaggctaacggaaaacctttctgtgaaaaattagttcattcccacagggataaatgatcatctttgcctattgttcacagacagcttttaaggctcttgacatagaaactggtatataaggagtgtttagaaaatggtagctactattatcatcattcactgggccctttgcaaaaggcagattaagatttagttgataaaaggaaatgagcctgtcgaaactgctgagaaagtagttgggccccagggctgagcctcattcattgtcctttctagtgggtaggctacttatatagtcagaggggttgttgcacaaggtgtaagaagtcttacaaacactccctaggaactcattcaatagacccagtggacttggagcacaggagcacacagcctggaatgtgctgtcatgtgctgttttatagagccacatcttcttcatcctcgacctgtctcacatcctgtacagagccacaactaagaatgtttgtatgcatttggctcaactggagggtgacctagaggaaacagtgctgtctcatatcctagattctcttgcaagctgaagaatgggaaatggggacattggttgtctgagatctcacatccaggatgggtcatgcctcagtaggttgtttagctccttgagaacttgattttctagaccaagtattctagtcacaagactcagaaccactcaggggccaggctgtagcacactggcaaactatgttcaagaagaataaaggaaggagtgaaggtggccagtgatatttgtgacatcagggcatccttagccacctactctttcttttttcttcattgtttaccgaggtctaccctattatttggggagagaatatcttcttagtgactctactggaaacccaccgtaatacagcttttctaagacccaaagcagtacactcatttgcttgtggttaaccattaggcaggatgaggtcatgaaggaacagagaaaggcctgaatttaagtacaaagctcgttgccagtggctagaagctggcaactgctctatttgaagtaagtagcattttttcctgactcagtgtgtgtctttctttagagaaaatgaggtgacacaaaggccatacagctctaatgagaagtccttgtgaactgagaaacattctctcctcctaaggcttggttgacatatgccctcatggatagaggtcttggtagtctctgctgtttcctgccttgtggtgggaagtggtgggaccttagctttctgtgaggaaaacacaattcatcttcccaggcatcagcttgctctggctgaaggccaggcaagtccaggcttccattcctgatttattaaggttttgttgaatacctggtataccttggctttcctttcctttcagagcctctctcttgaaggaaatatagcaggaaagaggatatttggtgtttttctttccacatctacagtttatattgcagaaagatgaagaatccagacacaaggagtggataagcctggtgtgtgatcccagctctgctgtttaactagttgaatgccctgaccaaattacctaacattttgagtacttatgacaaataatattgttgattgactgtcatcattttgaggattaattgaagctaatttttttacttgtttggcccagtacccacaatctaataatcacacacaaatctattgtcccttattatgtaactcacacactatttggccaaagctatgatgggtagctagaaaacaggagggacctgtgtcatcctagcctctaccatccatgagctgacaggcattctgggcagggaacagacttggatttctacacggtcgattttggctagaaattaacaccacaggagtggctgcagctatgaataagaaagagcatagaaccctgtgacgctagtgcatctcaggcagatccacaggaccatccatctaggttgcactgagcagtcaatccagagcaaagcctttctcatggtggccaccgtggcagcagttattacagatactgtctcagtcctcctcaccactcagtgctcctcctcctgcaatgaggcacagctttagtgagacagtagttcctggaggacccctggtttccatggtttcccgtgtataaatgccctttgcctcacgaattcccccagtatctctcccactttccatcaggagcttcgtcacaaagaatcatctttattcagaaatgtctcaactgttgtttgtcttggggaaccgtctgtggtgtgccatgcatattaatacagaggatgaagtcatgccttcctcatgctgctcagcaaggagaggctgtctcctgccacacgctggagccagagccagcagcttcccttcttactcacacttcacagtgctagatagattgaggatttcccctgctcgtcttctttctagcaatcactctgcccaggaaaatctgagctcagcgtgtgcaatctgagaggctgcgattagcaaggacatcttgttacaattcgggacgggcgacacagagggttccttcaagagcttctgggccttctcatattccaggcttcaaaagcaaacaatgtaagacagggttttggacagcgcttctgtggtttatggcaggagttccccattttttttcatttgttaggaaactcctttggggggaaaatctgcatcccatttagggctcaggagcagtgagcatgcggaccgtggcactgggtggtaggagtgagcaaagaagttgacttggttggctctattgttgcccagaggggatttgcggtagtacagaccatgccttgcaatacccacagtaggtgcttgagtgggtgcagcagatctcagaagcgaaggctctattgctcactgagttcaaatctgtggccttgcacttggtagtcacataaccagcagcaagttgttatggtcgccactccttagctcccaacttcagagtcaagcggacaatttgttttgttttatcactaggataaacttttgaacgaatctctattccgtatttctattccacacccaccttccaactccttttactggctcccccattccaccttctcactcacatccctggctttcctatttaatcactttcctgaactcaaatcctttttcttgacagaactcccatctactccggtggacagcctttcttattccctggatcaggttgctaggagctgcataatatgaatgtctgtgatgggtttgtgtgtgcttggatgtagtcctttctcttctctcaacttctatcactgttttggcgtttccaggttgctttctgaggtacagtattatacagggaaaaggatacccctctaccaaggccctatcattaaattgcctctggctagtcaggtacccatctctttgcctgccactcaattccattcattctggcctcaccgaccttccaaactttgaggagatgaatggatgcttgctacccactcattaatggaatcctggcagtgagagaggcctcctgactgtcctatttcatctggagagggtcccggtgcctaaaacatagaaagagtttggaagagaactagtttcactgctattaatagcacatgccttaaaggacagcagagtaaggactgagtagcacacatgggtcatatgaagacccctcttctgcaacataactaaatggatatgaaatccccatcacacaaaatagctaaggtgtaatgatatggaagtgcttcttgcccccattggatcaatacacactgcacacacgtgttgaactacttactacactgtgcaactgttactgttgatcaaagacatggttgatattcaggctcctataaacactagggactagggagatgaaaggctggcttaggcaagagaataggagccctttttgatactgtgaacagtgtgtggatgcttaggatctgttaagagagggtaagttccattcagccagccctcatggcattcttggttgttttccccttctggatctaggcctcctggagtatccctttatccaagaatgggtctctgggggatgctcgccttccccctgggatttctgcttgcttctgtgctcctggtggcttcggccccagccactccagagtctcccggctgcagcaacaaagagcaacaggtcactgttagccacacctacaagattgacgtgcccaagtctgctctggttcaagtagagaccgaccccacagtcactcagcgatgatgggacatcactcttggctcccggggaggatggagaggagcagaacattatcttcaggcacaacattcgtcttcagacaccgcagaagagctgtgacctggcagacagtgtccaggacctgctagcccggatgaaaaagctggaggaagagatggcagagctgaaggagcagtgcaataccaaccgctgctgccagggagctgctggtgaggctaccatctggtattcagtctacaaacacttagtgtgtgcttatgtgctgggtcctccactagcctcatgggtgctgtgagatcttggtgcatgtccctttttgcacttggcctttttttcaaggtacaagccatacccctcctctttattctctgatacagctctagaggcgtctggaagcctaggcagggagggttcagcaggctggtctcccagactaatgacaccagatgggaatgatcccagggctgttctgctgacaggccaaattgctattgaggagggaagggaagtgaaggtgtaaaaagaagagaaaggaagccgaatgcgatgttgaggaaattctcgaagtttcttcaactgtctaacaaggctggttttatcagctagcagagttctgcttactagagaaggtgtatattagagccctggtcaatagtaggtattcagaaaactgttaatgctatattagtaataaagtacaaaggacaactttttttttttcacctctaccgtttaagaacatggatgcccaggtgacaatgagtggtgcttttttgttgttttggttaagagtacccctaaacgccagatataaacctaggaaccagggacaacacaccactgtgaagaannnnnnnnnnnnnnnnnnnnacagcacaaggtcatttagacagggagagcagtatgacaatctttagggccatcgctcggccacggtgacaggggcaagcagaggagcagagaagtgcacagtcaccgcatgcacaggtggaactactttatctcatagtcgtttcagactcaaaggaaaatggcaaaatattataaagaattcccatctacccatgttcttttaaagcttttgagactaagttaagggtgcggtttgtttgcccttttaccttctccactgtaaatgacttcagtacacagtagtttctttgagctgagacatactcttccatcatttcctcgtgatgacagaaatcaggaattgatactgacacaatagtgttgattatctaccttatacattgcattcaaaccagaacattctctctaatgttctttatatttttttaaagtgtttttcctccctcccaccccccacccaaaccccagccagcagccccactttggaagtttccctaggaagggaagacgacattccaagaggcagaaggcactgcatcggctgacctgacctccagcttccccgagctgtgtaggagagccctggccaaatgccctggctcactcatcactgagcctaggctaccctgccatttctgtacacgcagttcacaaccagcagtgctgggtccagctccattctccaggataagatcaagtcccacctgcctctctccctggagcactggaacccaacaaccaatgaggaccatttaaagtccctttatagaaaaacaaaacaaaacaaatcaaaacaacaacagcaaacgctagtcatcactattcacaaggaaggaaccctcttttaggcaaacaaaagagaagctgagatttggctcaagtagaaaacattttcctcacaaagaccccataagatccagaaaatgtcagccacctctgactagtctccaaggaaggagacctccaggcctcacccatgtcttcttttcctggcagatctgagccgtcactgcagtggccacgggaccttcttccctgagacctgcagctgccactgtgaccagggctgggagggcgcagactgtgatcagcccacctgtcctggggcttgcaacggccacgggcgctgtgtggatgggcagtgcgtgtgtgacgcgccctatgtgggggtcgactgcgcctacgccgcctgtccccaggactgcagtgggcatggcgtgtgcgtgcagggtgtctgccagtgccacgaggacttcacagcagaggactgcagcgagcagcgctgtcctggcgactgtagtggcaatggtttctgtgacactggcgagtgttactgtgagatgggctttactggccccgactgttcccagggtgagagtcaaaatgcacgttgagggccacccttccttcctaatccgcggtctcagttgcattaactctattacaggttgccttacttggagagccaaacaatagagctggttggtggggagggggcccccaagtttcaccaagccctactggaggaactatacaattgatggctgctgggtgtggcttctagtagggttacccacagttcagtgggcaggctgcatacccaagggcaaacaggaagcactaactggattaaccaggaatatgcaaaaggaaagaaagggaggcacggagggtgggaaggggaaagggtagagggaggaagtacaagagctgagaaggaatgtgttgaggggaggaagtgaggggtagatatggttgagatacattgtatccctgtatgaaatttccaatgaattaaaaaaaaacataaaacaataaagtcctgggtctcctgccagagcttgccacatagaggtccctgggaggattctgaaaatatgcatttgtacagattcctcaggtggtcctggtggtgtcggtggtggtcctgattctgatagaatgcacatgttccatgttagggcaaccaaacagtaacttccaggggaacggtgtcaagaatggtgtgataggtaatctgcaccctgcaggtctaccaacacagccttaagtgaatagtaggtgctggagaatattcatttggccacccagtcttaccctctccaccctcacctcctgctcctcttctgcccacagtggtggctcctcagggcctgcagttgctcaagagcacggagaactctctgctggtgagttgggagccctccagtgaggtagactactacctgctcagctactaccccctggggaaggagcaagctacaaaacaggtccgggtacccaaggagcagcacacctatgacatcaccggcttgctgcctggaaccaagtacatagtcaccctgcgcaacgtgaagaaagacatttccagcagccctcagcatctacttgccaccacaggtgaggaacatcagatacaggctgtctgcagggacagtaactctctcctgttctagttctgatctattgctggttccttctggctggacccaaggtgaagggtctggaagacttaagtcacagagtccccaaaccttggatacagaatgggatggaggatgcaggagactggctagattggcttgcagggcatggtcaccactgcatcagcagacaacaccagactgataaaaagaatcaacatcacatgtatgtcactaatgcttcaggttcatgtctcagtgaacatccagggaattaaaagaatagggaggggtttatgacttgcatcaaataaggaaagctctgggaacaactctcgaagcagtgttcttctccaaacaaagaaagcaggggaggggtgggaacttctattcagaaacgcatacagcagattgccctgtcacacacatgtaatgacaagtacattcctgagcattgaaaaaaaaaaaaggctagggtcttgggagtccttagaaaccaggttaaaaatggttttccacgtaaacactaagcacttataatccgaatactgggaaggaggagccagtctagcctactcagtgcgctccaggccgatgtgatgtcctgtctcaaagaccaaggtagacagatcttgagaaagaatcctctgtgcacctgtgtaagtacaccacacacacacacacacacacacacacacacacacacacacacacacacacacacacaccatggacacgcacagcggctaacattaatgtgtaaagaacctggacttataatgcaaatgatgattcacagtgactggaccgttctgactggctccttgttagttgctttaaaggcctttagctgcaaatccaccacactgacaccaccaccatcacagccagcaccatcagctgtactggcacacgtctgtaatcctagcccttaggagaaagacacagcagcttgagattctgagagaccctgtcagtatagtaagtcattttaaaagacggctttcttcctctagctgtggggaggctacactatgtagcagtctagcagctaacactttagaaatccagtttttcatgaatattcttttttaagtttctattattactattacgattgctattattattattattaaatcttttttacagtctagtcattattgccctcagactgttcctcatcccattccccccactccccgcatcttcaagaggatgtccccacctccccatacccaccccatcagacctccccactctctgggccttaagtatctcagattaggtatgtgttctctcagtgaggccaaaccaggcagtcctctgctgtctatgggtcaggacctcatatcaactggtgtatgctgcctggttggtggctcagtgtctgagagatctcagggtcagggttagttgagactgctggtcttcctatggggtcaccctcctcctcagcttcttccagcttttccctaaatcaatcaaaggagtccacggcttctgtccactggttgggtgtatgcatctgtatctgactgttgggcctctcagagggcagccaagctaggcctctgtttgtaaacacaccatagcatcagtaacattgtcaggccttggagcctctccttgacctggatcccgatttgagcttgtcactggacctccttcccctcactcagtctcttctccattttagacagttcttttagacaggaacaattctgggtcagagtttttgactgtggcatggcaatcccattcctccacttgatgccctgtctttctactgggggtggactctacaatttccctctacccactgtagggtatttcgtctaagcagttttgctgtttgagagtttggatcagtctagttgtctgagtgactgattccctctattacccaagggccccccaggtaccaggtgctgttctaggagctgacaaatgcactgtcctaccctactctaaatccctggggaagatctggatgggtaggatgatggcctgtagtcatctttgtggaaacagaaggctgccttgcctgttttgttaggaatgtggtgaactatggtagatcagtatcgtaagggctttgagaggcgtggcaggattttgttagcaagcactaaaaatacccctgcagttgaacaagttgggttttgttgttcattttatcctgggaaaatacatcatgggggaactccaggggtgtctcggtgagaatggaaggaagggcttgttctaggatatggggtttaattagataacctggggaacagggatttgctttgattgggatatagccaaggagtgtgtgttggggggagaagtgggtaactgtgcttgggcatcttagggactcttctctagaaagagggctcactagaagcagcctaagcggtggttggaaagaagtaagcaccatgtctgttagtcagaagaggggacattttgtcatttctgtggaaaatagtcttgcttttgtctgtgtttagacacggtcatagaatggctttgtttttgtctcagccttgcatgtttgcaaagtgtccttggctaatgctaatgttctgtggaatgacttatgagcacgggagaatactaagcatagctatgagagccaggccaaacttctgaacaataggggctgcttttgtctgtagctacatctgctacagacaggatagtgctgaaactcccagggaagggctggaacatctgttcgaaagcctcagcaactcttcttagaggctttctctgagaatttgtaagatcttgctacaatgaagtttgtctttctgtctaaactgattcaagttcaaatctgtcttccttgcacttcagggagctttagacctactaatacgtattcccatcttgaacattctccttaattccttgctttaaaaaaagtgtgaatatttcccaattcttttaagccatgtcagacctcttctacaatcctgaagtcaccttcattaatttcctattggcttttcatttggagaattctttctttgaaagaagtctcaaagcagaggctgggcctagcaagtaggggctacagtgagaagaaaggctctgagaggttcttgtctatagaagagagaatcagagatacaacagagggaccttgggataactaggttcatactctgcctaatataaaagttcattgtcatacatccttgatgaatggtcagccacaatgggtggcaatgcctccaaggtaaagatgacaagatcttggaagggggcaaggctgggaatcttggaggttttctttttctttctttccttttttttttttcctgtctcatactgtaagagcaagttctatcagcctgggatacagctattgtaattctaagtgttcacaaaagctctcagttgaccccttccaaaagtttttcccatagagtgccatccatttgaattaaaattttagggttgttttccaattggcagggcaaatgttcagccctcttattagtcttattgtgaacaaaggaatatgatgagtgtcctttacaggacagagcaaaagggcagcatgaatacactggggaccttgtgaaagtattataatttgatagaaggttcaaagaagatgaaaagaaagaccaggttatacatcatctgctttgcaattttgttttgggttaatgtacagtgcacatgaggaccatgcgctctaatttgagagttagaagaaggatctagttgcattagcaatgttatatttttaaaagttgaaatatattgccccagattttatatgtatatattcctgtggctagtgcaaaggacagggactctgtagctaaagggagaacacccattaagagcagctgagccttgggctgggcactttggatactgccccaagaggagcaactctgatgtggtcagagtctgtatggaaggatgagatgcgtggtgcatagtggaatgagccatggagtctttctaggaagagtctgccttccgtggagatggccaagagcaacagccagctgttacctgggttagctccaagattcctgttaaagactgtgtctttagctgaagccagctctaagtgtgtcaagaaagaggactgacttagtggccaatgtactgtctcagacctttgtgacttctgcactcaaccattttctcttgtcttctctgatttctgctctagatcttgctgtggtgggcacagcctgggtaaatgaagagactgagacatccctcgatgtggagtgggagaaccctctgactgaggtggactattacaagcttcggtatggccccttaacagggcaggaggtgacagaggtcactgtgcccaagagccgtgatcccaagagcagatatgacatcactggtaagagtctacactgggagattccagatgttggctgcagaagcaaaggtggagggagacagtgtatcctgggtcttaggaaccacactggattccagactcctagatataagcctaccctggtggcctggtgtctctgccagcatttaagggctgcaatcccaggacacttcatttacaatgtatgtctcaagtgtccttccaagtcaacatattttttgaggtcctatgtatattttaagatgtatttgatggtgtatacatacttcttttggaggaatattgggatagactggggtgggaggaagatatatatatgtatatatatatatgtgtgtgtgtgtgtgtgtatatatgcatatatatgtatatatatgtatatatatgtgtgtgtgtgtgtgtgtgtgtgtgtgtgagagagagagagagagagagagaatgagagagaatgaggaagttgatttggtgagaatcatgacaagaagggttgcgttatccacaggatatggaatcctttcttagatgactgaactaagtctactaagaccaggaactcagaaaataggaatgcagggatagaccaagctttgtaatacttgaagtttctacacttttcaaggacttctttaagaacagtggtacatgtacacagccacgaataccacaggtcattagaagaagccatctaaacgaaagatcctcaggctcattagcctcatgttccatcctctgggtcctcactctgctgtctacctcctcagctctgttttgagagaagagctcgcagctctccatctttgtggagaggagagagtgtgtgggcttcatggatgcgactgtctgttttcattttactagtggagtctgaatagttgtgtcatggggaacaaccacttaagttgtttccacagggagataacttagcccagattcccttctttcttctattataagaaaaaagttttgagtgaaactggttgttaggagctggaaaacatttggactataaataaaattgtgaagtaagtactcagtagccaacaaaggacaggagctccaaggactcgatgccatctgttccccaccacggggagtctaccaatcccaaggcttgtcacctgccttgacttttagctttggggttagcataaatcttacccttcataagagaatccaggtagaagctgagtgggagtgggtcgggagcctgtcttcacactcatgttggctgctcttttggttttttaggtctgcagcctggaacggaatataaaatcacagttgtgcccatccgaggtgatctggagggaaagccgattctcctgaatggcaggacaggtatggagatctcatcttcacattttcagatttttcttgtctccgtgtgacagttctaggatttccatggagcggtgctatggctgcctggatgggtgtctatactgaggggcagaagaacagaagcaaatctctcccgtttcacttcttttcatgtcctggggaaaaacatacctgggatcttggagtcacggggagatgctatccctgatgcctttcttctgactttaattgcttcaatccctgaatcaaattaccgtctcaaggcacttaataggcatagagaacttcattccccgaggacagatgaactagactatttgtcacattgtatttgttcctaatatccacactcaagcagtctgttctgaagtgggagatgatgtttaagaccctcccacgggagtcatggtatagttagcatttgtctatcaagaataagatgttgtgcagcggtaattggtcaaatatcaaccagaatggaatttgaacacattgtaggtttaaatgcatattgaactgtgcacatcctgcatagagaatgatgctcctgcgtacacagattgagacctggaagcgactggtgattggagcctgcaaaacaggaatctttccattttgagtttttcttaaagagtggcttcattctttccgttaagtcttagaagtagctaggtatggtgatatagtaatgacgctgaatggttcgagttagagagctgggcaattacaatgaagagctgtaatttaatttatgatccagacaagatggactgggtagtttgcctaaatggttgatgagacatttgagtgagtcagaaaatggcaagtacttcccttgcttctgaaagctttctctctggcttgattgagaggttatagatcaactgaaaggttgctacgtgccaggcagcaaatttcctcagcatttttcatgagttttgccatttagttctcacagtcagtctatggatgagctactactattatttctaggtcacatgcatacaaaaactaagacttgaaaacgtaaaggtcaagatcacccagccaggaaatggcaaagctgggttcgaaagaaggctgctcacctctaagccttggtgcttagtgacaggagcaaattgctgcttagttgatccttctgttgagagatgaatatgctttctcctcttacacaatcaacacaacacacaaccgttggccattggtgtgcatgagcgcgcgtgcgcgcgcgtgtgtgtgtatgtgtgtgtgtgtgtgtgtgtattattcctcttatatccagcaattctccatcagacaccaactgggtatcacacaagttaactcacttctaatagtacctattaaacataccagtagatttggactgaagggtcagaatttaaaaatgggttcaggaggaaactggaggactgccttattagaatttgaaacaacatcagtagggaggccagttgtggacctcaacagccttgggaggaggtgggtagagaagaggaagagagtctttttgagctctggttgaagagaaccggcatattcaacagtgcacgctagcaggaagctgcatggtcgaaggggagaggtgcttcagggaacaatgagaaagctcagaatgtcagatgttggttggtattaaaaaataatttaaagaagagagaatgagtgaacgaacaaaataggaaaagtttttctttttttagtctgaactcaaaaagcaggcagagatttagcagagcctgattctctcaccaccttatcatgtgtttggctgaatcaggtttcctatgggtaaactggtcaggagattgatggggtccagtggattaacgtttaggggagaaacaatagcatgctctcatctttccagtccataagaaagtcaatctccacctagaacaaccagggaaagaggaacctcagcttccattcttttgaccagaagagtgtgttatgctttcccttaataggattcagggaagccccgagacctccatcttttcatgtgttattttaaaccccaaggaggttaattgtgaagcttcccttcctaatgttacccaggggaaacaggatgtagagcccaaagcatgatcaggagggaagatccaccgtcattggcctacaccacgactaatcctggtaacacaacttctacttcttgacgaaagccttttatagtcacattaaatgtcacagcctctgagttcttacaacaattaattgcgtgtgccattgaattggtagttaacctttcaagtatattatcccaactagactattagcatctgagaagtgtttttattgtcaattatatcctaacatcaggatgagacacttcactggatctcaaataaatctagggtatgtgcactactaaaataaaaaagaaaaagatcctatcgtttctgaggtcagggaagaccatgagttaatttaggagattaaaaatttgttttctccaaattttttgtttcttgcaagctgagaaagagcaccaggatttaagagcagtgtatgcgtacgcaggaagggaatgtagttcagttattttccacttaacaagtcaaccaatggaacttgttaaaacaaaactcttaaaactgaagggtctccaaataaaagggtttattgagctgttacagctgctagacaggaacaaaataaaacaaaacaaaaccctgaccaggttcttggacaagttcctttgactattagcaacaaagctaaatagtagttgaaactatgtgagtgggacgcagagagccaagaatacatttataaaatcctgggaaggaacacgtatgtgcataacactgagtctacactgacaatagataagagagatcagattatcacggacatcgggagatggaattccagcccataagaatgtagcttgaggaattctcccaagaaacctctgctccttccgctacaatcaggaccttgaattatgctggaggaaaaaaaaatgaggacaaaacaatgaagcaaactaggctttatttaggaaagtagagaacatagtgaggggacaggtataggcttctcaagagacagagactaacaaggatttaacactatctacaaaggattttgaggtcagactggtcaaagaacatgatcccgtatctaaatataaaaatctaaaattaaaacattgaattaaaatattctagtatacttattttttaattcaagaattgttttactcgtcaatgagattataaggtgttttatgagtgtactcttcaggtttatgaatgagctaaggggttgctgagaagagaagtttaagtcaaaaaggtcaaaggaattattgctgtaccttatatcaaaacaaaatcatgaccttttgactgtaaactctgttcacaacctttttgagacttttttttttcagaaaaaagaaaatcctcaggtttacagacaatgaacaatcggatatggttgaactcaaagggcactaacattttgtccttaaacattaagcatggttcattacttgttttaactctccagtttcatatatctctcaggaaaagtaacattgtctccctgcaggcaatctttacaatgtgggtatatgaagactgcatctttccattctcctatccccatacgtttttctgtctccctgtcctgctttgggattattcagagttgagaaaaccttggagtaagagagcaatgtttgtcgctctgaattattcagttttaatacttctggaagctttcaagtaggcagggcgtggtgattctggtcagtgactatatttaagacaaggtttctatgtagcattcaaaaccagggagagagatcttacctttagtttcacccacagttaataacagattcacttcctttaccatcttcctcccccctcctttccagtcatccctttatcaagctaatatcatgagaatgacaaggctgatagaggtcagtgaggaccgccagtgtgcggcaggcgggaagttgtagctgaaggaggcctctgggagcaggttggagagatcctgttttgtagatgaggctacagctgtagttcatctatgatttggcccaccaccgcagctactggaagattttgttgcatggaaaaacgacttaatgttccccacatcccctcctggcagacagggagggtttggtcttgcagggctggcttcatgcaactgtgtaagtgtgtggggtccatcggtggggtctacttctcattctcagatgccagcatctgactgctgtctttgttccaccctgtgaatgatcagggatcacagctctgtgaggatccccctttctagtctatgctggtaaagagttgagagaaagggggtggggaagaaggcgtcactgagttctaggctggttctgtctggcaggacttctgtggtttaacttctagatctagagtggctgtagacatagaactagattaaattttctttcctggtgttcataaccaagatctatctatctatctatctatctatctatctatctatctatctatctatctatctatcttctatctatctatctatctatctatctatctatctatctatcttctttctatctatctatctatctatctatctatctatctatctatttatattttaaacgctagtgttctttaactcaggtctagaagctcaccccacagaaaacccaatgttgggaagattagtttttcgtgttttctttcttttttttttttttttttgagacagggtttctctgggtagccctggctgtcttggaactcactctgtagaccaggctggcctcgaactcagaaatccgcctgcctctgcctcccgagtgctgagattaaaggtgtgcgccaccaccgcccggctggggagattagtattacagtgaaagaagtgctttattcagtgggagcttttacttgaaaatcacccaggaggctaaagagttgaggagttacagacataggaccagaccaatgagggagagacaccccctccaatgaagaagagaaaggctactgtctcttctctgaacaagcagagctctttcagaaagtcagatgcctcgtcttttcattgtctcttgttttcagcggcatctgatagggtttttttctttctataaaccctgaaggagaaagagagacttagcaatgtctaggtcaagttaatcctgcattataactttaggcaaagcatttctcaaatgatcaatatctctacatgcagagcagagtagaatctgacccaaaggttaaagcaaaaaagaggacagacacagaatgaaggcagagatagcaaaactttccatcccacatcaatcacccatcagacacgtgcacagaaaagcagagtcggtgttctcaggaaagagttcctcaagtgcttgaaaagcaacctaggctactgttagcattgcaacaatgcactgaatgctttctacagcaaagcaaatggaaaactacagtgtctttagctagattatgtaacttatgaggttagtgtttttttttttaaatgaagggcaaatgattctagaggatttgcttagggttttccttggcaactactccatctcttcagtgttctgaggctgctgagggaacacaagctccaaggctggccaggttggatctctcagtgcacatagacagttctgacgctaccaaaccactggcctgtgctgtgacaagatgttgcaggctaagtactgacaggggcacgttgtgggagtgagaggtactgctaggatgctggactttgtaggtgtgggtgggtcactttggagaggatgagagtcagggctttcaagagctggattgcactcctctctttgtgtctttaatcttctcttctcctttcatcaccattgctgagactgagctatggcctgggggtgggagtggggctgtgtcagcatccctgcctcacaagcacagagacattggggtaaggggtcagagagagaatcctctctgttgtatacatgtcttcttctgaacgatctcttagagcctcctgatgttggcattagggatcttcaggcttctgcatccagacaccccctctctcattccatggaactccctttgccagtgagatgtgtctagcacccctacagcccaagctgttttctttctctttagaattctccccaagttcttatcaactactcctatgttatttcaggttgcagtagcctttcagagcatagtttattccatctacaattgttaatgtttatcccacatagattgaagagatgccagtcacattggattggatccacctaaatgactccattttaacttatgatctctgaaaagacctcagatgcaagtagacaaagattgttagtgttgtgacagttgctagtatttattactgccgatcttacagaagttatctaacctgtctgggcctagcgtatacatactattctaagaggggaagactattagttttcctaacttgtgaggcacctggtgaatgccttgtgtttttaccatgggatttggtaactaatgtatgaaaagcaccatgatccttggtgtgtgcttggtaaatggcagttgacttactaaatgaaatatgaactgcctctggtaatggaacacatttcatcttctcttgcaaataaaacactgcccttatgtttgataaaggtgcactgtagctaaggttgaaaaatgggactatgtgaaattgtaacttctctctgaaaaatccttggctgagagaccaagaatagattgaggggcggggggggggggagggagagaggaggagaatttagctgctttagaccaagaagttgttttgtggatttttcagttaaaaagatgtagatccatatacagaggacattctagggtcatgtcttagcggtgttctgtttgacatctttatcagtggccttaacgaatgtgtattgatggcttgcttataaaattctccagtgtcaggaagatagacagaaaagtgagcatatttagacaaaagattaaaatataaatggaactttaagagggcaaaactaatgagtataaatgttggccaaggacattattaaacatgcatagattggagatggtgggatttaacatggaagtccttattctttgatgcatatcagaatcacttaaaagttttgtttatgtgtttactaaattattatatatttttagataaggctttactcactggatcagtctggtgttgaacttcatgtatagccccggtttatctagaactcatgtttctcctgcttcagacttctaagtgcaggaatgatgggcttgtcttaccacaaccaaggaggtgtgtgttatgtggtgattcttgtttctaatcccagcgttcagaaagctgaggtacaaggactgtgagttcaagccaggctgggctatatagtaagattcgctttttaaagaactctcataactccccaagcataaaacaaaaccaaccaaacaaccaaacaaccacaaccaaccaaccaaccaaccaaccaaaagtccctgaaagaagctaagcgatgctagggcttactctgcatttcttgaagtggaatctctgctggctgtacttggcagggacccagtgttggcagaaattgaggacacctagatagggggactcctgaggccacaggtacagggtgtgtcttcaggatacagttggaaaattgttttgaacaccaatgacctcaaaaaagactgctgactgtcttatttatttataattgccgaatgccatcctatattccctgtcacatacattgttgtgggggtaaataagttaaattttcggcacttttatttcaggaaagaaagacggaaacattgtatagatagatgataaatgcctggtcaagaaactttaatttgataggagtagatagatgaggccagttttgatttcaggggaattgagaaaagaagggataactgttcttgaagagttgctgagtggtctcctgaaagggagttagaggcagcccacctatacgtatagtagacatgttatgggagttatatttcacagaaactactatgtcagtgatagcattgattactttctggtttatcagctgcacctaatagagtttcttctaatgtagtcagtaacctgaaactagaacagatttgtttttttaatctaccagggacctattctcagtttaagattaaggcagaggctagatatttgcctgtcatggttgaaagagagactcctttgtattgttgagagaccattgatctagaccttaaagtgactgtggattttaccaggcaactggttcctctaatttttatttcttatgtatgaagaaattgatggaccaaccaatgtggtcacaaatcaggtgacagaagacacagcatctgtttcctgggatccagtgagggctgacatagacaagtatgtggtgcgctatatcgcccccgatggggagaccaaggagaaggcagtaccaaaggaccagagcagcaccgttctcacaggcctgaagccaggagaggcctacaaagtctttgtgtgggctgagaggggcaaccaaggcagcaagaaagcagacaccaaggccctcacaggtaacgggagaatgggagttaagtaggtttcctcagggtaaggaggaagttgcttttgaaggtgaagatcattaccatttggcatcagctcttttattggtggggttggagaatatttacaaaagcaattttaaaagagcgttattttaaaaaatttttaatacaatatattttgattttatttgatgatattgttttcccttcccatctactctcagataccaccttgcctcgctgctcacccaacttcatgtttttctcttgctccaaaaagcccccaaataaaacaaaacaaaacctcaaaaatcaaaacaaactaaaaatataaacaaagcgctttctctctctctctgtctctctgtctctctgtctctctgtctctctctctctgtctctctgtctctctgtctctctctctctgtctctctctctctctctctctctctctctctctctctctcacacacacacacacacacactcacactcacacacacacacacagagtttgtttgtattggtttctattcctgtgcatgggggctgcttggcatatatatgcttgttctaccctgtgaccctccatggggaaatagatttcctatttcccagcaggtgtgaattgaagttagctcttcccttaggggtgggactttgcatctattttccacgatcagtgctgagatttttttatcctaaagcaaatttcaaatgtcacatttatgattttttcttttctcttttcttttcttttcttttcttttcttttctttcctttcctttcctttcctttcctttcctttcctttcctttccttcccttcccttcccgttccttccctttcttttcttttcttccttcctttcttttattttcttccttcctttcttttttttcttttttctttttttttacattttaacttcacatggagctataagactatttaataggaatagtcatatttatttgggatgaaattccatatacatctgtcttggagtagagtaaaatgttgtaatttttactttttaatgacaactgaagactttggaccaactataaatttgaatgtttatctcagattacagtggtgatagaagtagtttgcatgcagccaggagctctctttcagacaaatggtttgcattggcatcaacatttgccaaatgcacggatacttcccgtgaacctttagaaacataagatctccaactgcatctgcttggtctgctcagctcaggccttcagatgttctgagacgtactgagacagagcatggccagtctttgtgctcacacactctgttggtcatctctgaattcacaacagtctaattggtatcctcctgctcttccaaagcacttagtaggaactcagagggaaaggatccgctgattgtgtttgtacagtcactgaatacagagaacttcagagaggcatgcataggaattaggaatatggtttcagatccttgaccatttaaaatttaactccagggttgccatttattagctgagtggtggtgggtcaattactggtttataaaatggctcaggaatgtctgtgatacaggaatatggggagggttacataagtgtcttagttagggttactattgctgtgatgaaacaccatgatcaaaatcaagttggagaggaaaaggtttattcaatttacacttccacatcacagctcatcatcaaaggaagtcagaacaggaactcaagcagggcaggaacgtggaggcaggagctgacagagtggccatagagaagtgctgcttcctggcttgttcctcacggtttgctcagcctgcttgttttttaatagaatccagaatcaccagcccagggtggcaccacccacaatgagctgggccctttcccatcaatagctaattaagaaatgccctacagccttgcctacagctcagtcttttgtaggcattcccttaattgatgctccctcctctcagatgactttagcttatgccaagttgacaggaaactgtctaggtcagtgagtgaattcacttaaagcaatgggtgcacatcacttttgttgctgtgataaaacactgaccaaaaccaatgtgaggaggaaagcatctgagaagggacccctgaagagagcctggaaggacaggtgggagctaacggggaagtcacctgtgcaaaggcctcagggatgaggttgagcagttggtaatctcaagtgtcctttatggtaggcaggtctgtgacgtggtaaaatagcaaggatggggcctggacattaaagtgtcccaggagttagaccctttattgttccacgatgacaacagtgatatagccccatctctgtgcttcttaaggtcagttgtctcatgggaccacttgtcactgctaggtctggcccgtggtggtgtgcagggtgaaatgctcttttatttatttatttatctatttatttatttattattttaaaaatattttattaggtattttcctcatttacatttctaatgctatcccagaagtcccccataccctccccctttttttcccctacccacccactcccactttttggccctgtcgttcccctgtactgagggatataaagtttgcaagtccaatgggcctctctttccattgatggccgactaggccatcttttgatacatatgcagctagagtcaagagttccggggttctggttagttcataatgttgttccacctatagggttgcagatccctttagctccttgggtactttctctagctcctccattgggggccctgtgatccatccaatagctgcctgtgagcatccacttctgtgtttgctaggccccggcatagtctcacaagagacagctatatctaggtcctttcagcaaaaatcttgttagtgtatgtaatggtgtcagcatttggaagctgattatgggatggatccccagatatggcagtctctagatggtccatcctttcatcacagctccaaactttgtctctataactccttccatgggtgttttcgtcccaattctaagaaggggcaaagtgtccacactttggtcttcattcttcttgagtttcatgtgtttcacaaattgtatcttatatcttgggtatcctaagtttttgggctaatatccacttatcagtgagaacatatcatttgagttcttttgtgattggattacttcactcaggatgatgccctccactataacaacaggaagtgctctttctttctgggaatatgcttcaggaactggctcctagagcggggttatgaaggcatcatgtttaggaatgcctttttgtttgtaccatattgtttggagttttgactctaatccttacattttgagggagaagggatatcccatcccttatatgccattcttaatagcaagccttataagcacgtaccacgcagacgttcatctatgaggaaggatggctctttccttctttgtagaggggcagagacagaaacttaagttatgcagtttgttctaagtgaggaaccaagaaaaccagagcctagtttctatcccatttcatcacacagatactcgggcagattctcctaggctccttctcatgaacccacacctcagtaccaccagtttacagctcaccccattccctggacacacacataacgttctctgtagaaagcactgacagctcctacttcaagaacatttttcatcccaagagcagggaatagcagagaagattattgaaatatacttatttcaggtgcaaggggtcagagaactgcaagagggtgctatgtaatttatgataaattacatacaaatggcaaaagaaaagtttatggaattgatctatttattggcactgtctgaattcttcctttcagtcatactagcagtttattcttagaatacctgacttgtctacttagagcttagctctctcaatcctcagcatatagctgactgtggagttatttgacatcactattttggctgtgcctttggccttttaggaactagagagtaataaagcttaccctcctcctttgtatctcccttaaagaaattgacagtccagaaaacctggtgactgaccgggtgacagagaacagcctctctgtctcgtgggacccagtggaggctgacatcgacaggtatgtggtaagctacacttccgtggatggagagacgaagcaggttccagtgaagaaggaccagaggagcaccgtcctcaccggcctgagtcccggtgtggagtacaaagtttacgtgtgggcagagaaaggcgatcgggagagcaagaaggccaacaccaaggctcccacaggtaagcagagagagatgcaccattggaatgaagtgtgaacatacagatttgagtgtgcatggtaccacaggttgggacctgagaccagagactacaaggatgcatgagaggtagctcagccagtggcatgcttgcggcacaatctaagtccaatccttagcacaagctggatgtgggggtgcacacttgtgactctagctctggggaggtgcacaggtgggatccctggggctcactggccagccagcctaacctagtcagctagcctcaggactcggtgagaggagtaagattgcacaggagtgacgcttttagcagactcggtggttgtgcgtagagggtctggttttggaaatacttgtgacaataccttcagagtgctcaccggagaggcagcccttgataaaatgataaattagttaccctgacagtgtgacaggtgtttaattggctgtcttgatatgccatatgttactatgaagagaatattccttctacattttagggagccaaaagtcaagaaaacatgttaagtgtatagctagcctgatattgagatagagacccagaaactgcttcctcgcttgactcacagcagaggcttggcttggtaaaccattgccttgtgctgaatgttctggaagataaaaagcaagataagggggtgtgtggcttccattgttatagcttagacttctcaaacatgttcctttcagacatcgacagccccaaaaacttggtaactgaccaggtgacagagaacactctcagtgtctcctgggaccctgttcaggccaacattgacaggtatatggtgagctacacctctgccgatggagagacaagagaggtcccagtgcctaaggagaagagcagtaccgtcctgactggcctgaggccaggtgtggagtacaaggtccatgtgtgggcccagaaggggacccaggagagcagaaaggccaacaccaaggcccccacaggtaatgggacacgcattgcgctgtgcatgagatggcgaggttggcttctccctctctgacatgattttgttgattagaggcaatgatgctccctccggaattgtatacctccttctcttacaatgcatgtcttacactgtaagtctctaaaccgtggtctttacagactgatgcttcctgcttacagcctcccctgcttgcctcttcttctgcctgtgaagatgatttgccattagacctaagtgtttcactctggcaggaagcaaatatgaagggagtgcaagcaactgtcaggcggagagagccagccttgtaaggttgtgatccaccaacaacttctttttaaaaaatccgcgcttgtttagacccttcccatgaagtttgttcctgtttctgcccttcggatgagtgctgtaggcagaaataattgcagtgttttgttctctacaaacaagccagcgactagtcccccctgtgttgacttttttagtaatgaaaatgtccatttccatgtatgggtccatccttcatttgcagttagccatttgcatgctaactgcttgctgtgggaagcggtactgctcagcttttcttctgttttcctccttgaactttaggtcccttcctttccgctggctaactctcattgttttccatcctgacccgttaccactccttcctcctaatctcctagcgctcttcatttagtggttggttgattcaaggttggttagctgaggacccccaaactgccctgatggtgtcacctcacccttctagctagtcctccaggacagctcctgacacgatccccaagcactttctcaactgatgttcagttcatgggaactgcatcccccttgctctttgtgagagcatcctgccattttctcactgatgaagaattttagccacatgtcaaacacctgctgatgtgttccccgtgctttagaaagggtgtctcaacctcggcgctgctgacatttgagcaggacaatcctttgttgcggggctctttcttttgtgttggagaatgcatagcacaccctgtatctccctttcctctgccaagttgtagctgtcagaatgtcttaggcattgctaatcaacctggctgaaatcttttgctctatagcaaacacagtaagccctaccagggatcgaggtgaaacagattaaagttcagacctcacccaaggtacacaaagtctttttatgtaattccagtttctgagtcctaacatactggcctctccaacttccttaataactggacatgtttataaccatgttagccaaggaccttaaaactattgatccctccttacctgtgggcttccaggtgggaagttagataccatttttcttgaggtcatagcctaaagcaacatatgaaatagaacctttgaacaaatcaccttaggaaaatggcttttttaatgaacttctttaaaaaaaagaaaatattactagtttattgataaaatatattttcaattactttatgttatgtagtatggaggacaaaaatcccttggatttataaagtgtcaatgaattgatctcatcatagtaatgatagttgaaggtttgcacatctacctggtgctaagaacagtcctagcatgtgattaactcataggatctaacactatgatgtaacacctttacaagatataaatcaatatcttccatattccatttttgtttcctcttcagaagaaattgaggcacaagggctgggatgccttttaccaagttttgaatctcagaatgaatcttctgtggtcctgaagctgtaaacattgtttttatcttacttggcaaagctaaccacacacacacacacacacacacacacacacacacacacacacacacacacacatacacacacacacacacacacacacacacacacacacacacacacacacataaacattttctactttacaaatgcagaacagagtaaagcaacttgcccaagtattaaaactaagttaataattgatgaaaatagatggacatgttgaatattggtacctcaaagtctataaaagagtctctctctaatcttagagatgaggaagcagagcttagagacaggcagctgaattgccagaagctggctatcaactggatgatggcagagctgagacgaagttcttggtctgctgactggaacccaagggatttcctgccctcagcaatgcttctgaaggtagaacatatagaacataaagatcctttggactttacagtttcttggatgcagtgttcattccagtgtcctgtgctgtccccctgaggctctgaggtcagctgtggagacaaggtctctgtccatgaagcactgaagatacatatccaatatggagaaaccttaagaactggaaactctcccagcccaggcccaatggtctcagtttctggagcctgttactagtgtctactgatcatctctttctcttttagatattgatggccccaaaaacctggtgactgaccaggtgaccgagaccactcttagtgtctcctgggacccagtggaggctgacattgataggtacatggttcgctacacgtctcctgatggagagaccaaggaggtgcctgtgtcaaaggataagagcagcacagtcctgaggggcctgaggccaggtgtggagtacaaggtggatgtatgggcccagaagggggcccaggacagccggaaggccaacaccaaggcccccacaggtatgaacattgtagccggaggatgtgacatatttcatggtaagctttaggaaggatacttgctattccttctttgatcctggaagaaataaatgatcatagaagaccagagtggtacacttttgtcataatacccacaccctccccacatgacatttacatttaatctagaaatatggactcatgctttggtctttcaaaggttagtgattgttcacatcaacatattgttcttcgaattgtatatttccatcactgtcaaacactgaagtatttcatcttgaagataaagtgacatcaagatgcctatgctttagggtctaggagctaagtgctttggggaaatggtgcctgctgggctttcctcgatacaggagaatttattgttctgttcgtgagtagattctcttgagtactgtgtgtgcgttccactttcacggtcctagagttgcagtacgtacctagcatacacaacaacagttggtaagttcaaggctttcctgcttctgtttcatttgcaaagaatagtgttataaagatatgtgtgtatatatataatgcagtccttaaagtatacagcttagaagttagtgttacatattgacagtgctgtctaacaattagcactctttagaacattgtcctcacaataaagaacatgacatacatttccagtcattgccctttctcttcccctccccatcagtagcaacagctgtctttcctagatttctctgttctgcacagttgtaatacatggagtcacacagcatgtgctgctttctcagaacagagttttccagttcatctgtgttataacatatatggacatttacatttttttaacattaatatttccttggatatacacatttgtttactattttgtctcggtggctatttgttttgtttccacattttaaccatcatgaataataacactggggcattcatttctcttaggtagatgtattagaaatggattgttaaccctatgtgtttaattttgagttcttaccacagtaatctccaaagaggctgtgccctttcacacacccacaagcaaagatcagggcaaatgtcttcatgtgcgtggtcctgaggagaatttgttattggcagagcaggagttcatgttctcattcctagctaagagtcctcaacctagtggagtatatgatttctataattcacataaaataaagatcatagtgtctgactcatgaaatactcatgaaatattgtggcatattactgtatatgtttctaaaatccactcttacaggtgaggagactgaggtttagttagaagttgaagtctccaaggctgctgggctgggaatattttcactatcttgggctacttccttgaggatctgagagtctagttgtggagataagatctctgtccatgaatcaacatcagtataggaaatgggagaaacagtaagaacaagaataaatgctcagtccagccttaaagatgtctactgtgtgtgcatgtgtatgtatatgtatgttagaccagtggttctcaactttcctatgcggcaaccctttaatatagttcctcatgtggtgatccccacaaccataaaattatttttggtgctatttttaacttaattttgctactgttatgaatcataatgtaaatatctgtgtttcccggtgttcttagacaactcctgtgaaaggttgttcaatccccaaatggattgtgatccataggttaagaatctcctgtttaggcagagtcttgttgggcagcctatactgatctcaaattcatgatctcatgatcccaggcctcagccttctgagtactgcgactacagacgtgacacaccacactcagtttactagtggatactgatcaagcttttcttttagatattgacagccctaaaaacctggtgactgagcaggtgacagagagcactgccaccgtgtcctgggacccagtagaggctgacatcgacaggtatgtggtgcgctacacttctgtcgatggcgagaccagggaatttctcgttgggaaggaccaaacaagcaccgtcctgacaggcatgagaccaggtgtggagtatcaggtcgacgtgtgggcccagaaggggacacaggaaagcaggaagaccagcaccaaagccccaacaggtaatggacattgtcccctgagaaggtagcagttatcatcccacacctatgagaagtcatgtttgggtttctttcgctgctatgatgatcagtgatttcgagagaatcgggatggcagatcatttctgtacagcttgcaccatctctaagtgctggacacatgtctcttaataaggacctcatgttcagccttccacttcagcctcatagaagttggtgataagctgtggatataactcagtagtgaatgcttgcataacatgaacaagtccctgggtttgatctgctggaaaataaaagggccaccagtggcaggtgacttctgcccagtgttctttcaaccatgtttcccctttgtgttcagtctcaaaatatttctcttcatgaagagatggaaaggagatggatgttagggcctgtgaagtaagtactttaggaaaacggctttcactgcgatcactttggagcaaggagaggatgttaatttttagtgataaatcctctcccgagtgctgtgtttcattctggggatcacaccattgctatttcatataacatttggtaatcatcaggcctctcatctgtgcttacacattttgtcagaacaatcgtattagctgatatttacatattgaaatgcaccttttaatatgtatgacttgattaatttagactactcacagagttctgtaactactactacagtctattctcaccactgtaaagaactaagctcagactcacggccattgccaatcagtctccaacctcactacttccaatgctactaacaatggctgcctgtctctatagttctatgttctggacattgtttataatggatttatcatctatatagcctctggtgagatctcattcattttggtttctttgtattgtaacacatatcagtatgtaaattagtatttcacagtacatgtgagcacatttgattttcagtttgctccttgtttgatatttggattattttaacttttaaaagtctaagatgaatatgttataaggacatttgtatgtatatatatatatatatatatatatatatatatatatatatatatatattttgtgtgtgagatgctagggttcaaacctaggatctggtccatgctaggccaaataaattattttgtcagactaagatttcatgttgtcagtagacatctgactatattcccatccttctgtgcacaagattttttttgcatatatatgccatcacttttcttggttatataactaagagtagaattataggatcatttggaaattctaattttaatttattaggcaaaagttgagctaagattctaaatgctgcctagcaacaaataaggactattttgtctgtgcacttagtcctcagagatgttggctacattggtagatcaggcctgagttagtgtcttcatttcaagtctgagaatccctcagttccatgaagtgagtgatttctgtaagtcacatagctgatacctcgtgggtttcatttctcaagtactcatgcagtactgaggtatcttataatttattaacccaggcccacaagtacaaataagaaaagtagtcaggctattacccagttacccaggctgatggcagagctggggtaaagttcttggtctgctgactggaacccaagggcctttctgccccttagctctgcctcttaaggtagaacacagtcttcttggatgcagtgttcattccagtgtcctgtgctgtccccctgaggctctgaggtcagctgtggagacaaggtccatgaagcactgaagatgcatatccaatatggagaaaccttaagaactggaaactctcccagcccaggcccaatggtctcagtttctggagactgttactagtgtctattgatcatctctttctcttttagatattgatggccccaaaaacctggtgactgaccaggtgaccgagaccactcttagtgtctcctgggacccagtggaggctgacattgataggtacatggttcgctacacgtctcctgatggagagaccaaggaggtgcctgtgtcaaaggataagagcagcacagtcctgaggggcctgaggccaggtgtggagtacaaggtggatgtatgggcccagaagggggcccaggacagccggaaggccaacaccaaggcccccacaggtatgagcatagtagcctgagcatgtgacgtatttcatggtaaaccttaggaaggatacttgctattctttctctgctcctggaagagaccaatgatcatagaagaccagagtaatacacttttgtcataacacccacaccatccctccatgctatttaacacgttggttcaaagtaaggaccccatattctcctcttcttttgtctcttgaaggttaatggtgattgacacatccacccacggtttatcaagatgtgtatttcctttgtggtcagtttcaaaaggatcctcttgaaaagaaagaacatatgctaggatctgtgagccatatactttattgaaataaatgacttttgctgtgctctctttggaacagagaaggacattgctttcttagaaaagaagccctcttgagtactatgttttcttctctgaagatcctgtgactaattatatctaagaacagctgataattctaaagcttttccatctgtgtttcctcttcatcaagaatagcctccccaagatggcttttcacactccaattcaccctcttgaagagtccagttcagggcatatagtattttcttgacatagtctcagaattgcacaatgactgccactgtttcagtgacatcaccagcaagagggacctcctcctgtccatcaccagcagcttcccagccccattcctgcagccataagtaacaagtgctgtctgtctctgtggaggtctctgcttaaataaaaaagtgtatttttgttaattcttgagaatttcataatgcacacaatgcattgtgatcattccccactctccccatctcctcccaagataggttgttgtcccttctttcttctttataacccactaagtccactttatactacccatatactcaggggtgtggggccatccgtggttgacctaccacatccccaaaggccctttttcagaacctatcgattgtcaatagcctctcagctggggggccgggtcccattcatgctgcacggagttcaagattacagtggtctggtcatgtccacagacatgtttttgtgcaggtcctctccaactctgactcttacagtcttactgtctcttcttcgtcaatggtccccaagctagagtgtgtgggatatagatgtcacatttgtgggtgagccctccacagacatttgttctctgaactgtgaccagttgtcagtttctgcatcagcttctgcccactccacaaagaaacctctctgacttgttatagatatatgtcacatttgatgtggcctttagtgattgacttttttcatgaaacattattcctcaggatctgtctcattgtagcatgaatccattctaaattttatccttagtgagtgtttcattgtatggccgtatgacaatttgtttctccacttgtcacttgtgaaattgtgcattgtgtcatagcatttgtccttgagtatgtttccaggacataaatgcctaggagtaaaatttctggatcactctcttattctgtcctttatttttcactatattatatatgccagtatatttccatagtgtttaccccactttacacacccattaggaggaaataagggctttcttcctttcctcagaggaatttgctgagttgatagcacccctgttttacaataaaaaaatctccaaaccagtgaaatctttgacttcaccaagacatatagagagctggtgaaggtagaatctgattcatgaagtatacacggaatattggcctatcttataacctagtctaagggtcacatttatgcaaaaggaaactggctgtggtggccatcccattgtcctattctttctctctgtggaaccaagagtctctgtctatgagatcacataatgaaagcagacatatggggtagaaaactctaagatcaggaaactcagcccaagcacaatgacttcagtctttgtgtctactttagttagtgtttattgaccagtgcttatcctttcagatattgatagtcccaaaaacctggcgatcgaccaggtgacagagaccactctcagtgtctcctgggacccggtacaggctgacattgacaggtatgtggtgcgctacacctctgctgatggggaatccaaagaattcctgattgggaaggaacagaggagcacagtcctgacaggcctgaggccaggtgtggagtacaaggttgaagtgtgggcccagaaaggagcccgggagagcaagaaagccaacaccgaaggtcacacaggtaatgaacagcatgggttagcagtatgatggctgccaggccaagcttaggggaagtcaagctttaatttcttcctgtgatacagatgggtattgatggattttggaagagcagctttatttcttgcacgatcaacttcacataccattccttactccctgaaactggtttccttatgtgctagaccagtgcttttccaccttcctagtgctgtgaccctttaataaagttcctcatgttgcaggggtctccaaccataaaattatttttgttgatacttcatagatataattttgctactgttatgaattataatataaatatttgttattttccaatggtcctaggtgacccttatgaaagaattaaacctgcaggttgagaaccactgggctatgttctccaaacagtctccaaactgctcagctgaatagttcctgatttctcttccaagtgcttggatttcttgccagagatattattttcatgagtaagaccggaaaatgaaaaaaaaatcaaaatttactttaagattctagattttacatctgctgtcacaagtaaaggcttgcttctctacatccaaatcatattttaattataaaacaaatttgtcacggtaaatgataagccccgtgagagagctctattgtcatgctaatggacacaaacttgtttgcaaaagccaaggtctccaacttgaatctctgtatgttgcctgtcgcatgccttgcatatagagcaaaagcttgatagctttactaaatgaatgagaaattagtgttttttttgaacttttaatagaaatcatactttcggttgtctgattctggttgtttggggtctccatgtgggtagggaagcattcctgggaagagatgtgaatgtatgaagacaagtaagaaacaaacagcaaatgaacaaacccccaccaaaatagagtgtctgagatagaaaacaacagaaaatgaaaactcaccactcaccatagccagcagtgtctgcactctgagcctcttaatggtatatatcgatttcttgttgttgctgccatcattatcaccaacatcatcaccaccatcatcaccatcatcatttttgtgcatgtgtgtgcaagtgtgtgtgtgtgtttacacataggcacacataggacatggtacatgtgtggagatcagaggataattttctagagttagttctctcgtacagtgtcagggatgacagtcaggttgccacatttgtgcaagcatctctactgactgagccatcttgctgacccaatagcacatactgactaagacttttaaacttgtagacattgacagccccaaaaacctggtgaccaatcaggtgaccgaaaatacagccaccatctcctgggacccggtgcaggctgatattgacagatacatggtgcgctacacatctgctgatggagagaccagggagattccagtgaggaaggagaagagcagcactgtcctcacaggcctgagaccgggtgtggagtacacggtccaagtgtgggctcagaagggggcccgggagagcaagaaggccaaaaccaaggcccccacaggtaatggatgctgttcattgggactgtcaagcttgtcatggaagagcaaacattctttccttttcttacactgatgtaaaataggaggtgaggaatgaacatgctgggttaataatagaggttcatctattactgctgtgtgatggcattggtgatttggggtctgtgacctcaaagactggactgttttaggaggacaccttaacccattttctccgacatatatagcacctgtcagagacaaggtaaatttgtaaacaacaaacgtttattttattttattttattttattttattttattttagatttatagttgtagaaaagaatcccagtgtctgggttgtcttgcatcatcacacacatggacaaataaacatgtaagacaaagagaaggcagaacttaagcctagatctgagctgatgtgcacagtcctgtgggggtatcagtcctttagtgagggctctgctctcaaaagttctacttcttaaaaccttactgagggttttgatgtaaaataggaaggaaggaaggaagggagagggagagagagagagagagagagagagagagagagagagagagagagagagagagagagagagagagaaagagagaaaggaaggaacccaaacctttcattcactttcaaagagagcaaagtagagcaacagatcctctgctgagtagtcgccctaatgccttgaaacttttcccgtagcacatgcccttaattgttaatgttccccagctactgaagatttcaggaactaatgcgaaattaatataaaagttctgggttaaagaactgtgttgaggcaagctgttcaacgtagacttcacctaatagaaagcatgtggtataaagttataaatgtcaccctgggaagcaggagagccctgtgtctagtatgaagctaacttttcatcgccatcttttaagggcatgacggacctagggatggagtgacgaacaacttagtatgatctgtgctctcctgacagccagtgggagagacaggcaatagatgaaaaggaaaatatgtaactgtaaattatggcacgccctccaaaggacatgaagatggtggaggttgagagaagagtgggatggaagatgtagtgatttgataggttgagatggtcatagggtgcgcattgtcagatgcaccaaagagctgactattaacaatgcagtttatacagaaaaatagagtgtaagtgctcagggctgacatggtagctccctctgtgcaggagacccaggctccttatctgttgtatatctgtcacccttaaggaattgtattcatttacttggtaaacatacatttgcattccagctcatgaaaagagtccttggaaagggcagggaatattccatgcatcagttctcagaaatctttctaagatccaagatacagtgcctagcctcagtgataggcagctaaagaaagaggtcctcagacagatggccacatgctcagcttcaactctgctatgctgtcctgttcagttgtcctccaaaacaaaaacaaaacaaaacaaaacaaaacaacctccaaaaccaactactttaattagacaaatataagtaaataaattatttggtcagactaaccacatttcatgttgtcagtagacatctgactaatggctcagtgatgtgttggacaatctggaggagaagctggccatttctggtataagtaatttcaggactgtaatctgtaatgagatgattgagaaatgggaagaggtaggtatcattggagcaagaggtgagagagcaattgtcctgagatgaggtgggaaggaagaagtcatcaggttacacagaagcacatggtgcctgaaggagaaactgtgccttagctatagattagaaacacagcatagtatttatctaaaactatttttcaggacacagtgagaataagttgaagagatgacaagggaataaatagatcagtaaaggagttactattaaaatctggttagtgacagtggaggggtgacaacaatagggatacagagaaggagatggctgacaacatattttggagctacaagcaatagtacttgattgataagacatggaataaggaaaataaagaatcaagtatgactgtctgcttcgagcaatatggaagattgcagtactatttctttttctgagaaaggaggctgaggggggtgtttatctcttcagggaggcaatgaagacttaaatgtttaaatttgaaatgcctgtgagattcttttgcttaatatatggtttgcttttattagtcccacaaatacatactggggatgagccaggcattgtagaagatctgcagtagtatgtacaaaccaggggcttagaattgtcctcttgttccacaagggtagccagtaaatatttcagagcacagatatgatagtatcatatttgtgacaaatggggaggtagggaagaagagagagagggagggaaggaagaagggagaaagggtgaaagagaacgagaaggagggagagagaaaaagaggaggaggaagaaaagagagaagagggaaaagagagacagtgagaagcagaggaagaggaagagggagggagggagaaagggagggagggagagagagagagagagagagagagagagagagagagagagagagagagagagagagagagagagagagaatatgagagaaattacaatccagtgtttagatgttccagcatatgcaggttacaatcaaagggctgaagaggtgaggcagaggtgccaatgtattaagcacattggaagagtatgaaactatggaagccaagagttgagagttttctgagaatgaatggatctgttttgtacaatgtcactcaaagattgagtaaattaaaacaaacaaacaataaaacacaaagactgagtgaactgaggatgtccatgtccagtagagagttgtccatctagaacgttttagagatctatactcgcagatttggtggtatggtgcagggccacagtggagctgagcttgaatgtgaggtgagtgatgttgaaatactcagatccttctctggtttatagagaaatgacatgaaatgtgaaaagaaggggggtccttgatactgattttctgagactgatagtggaggggaaatactaatgatcaagagatagagagaggaaaagaagaaagccctggaggtggaggaagacttaaacattcagagcatagaggtctttgtttgaaaacaagaaatagggatgagggtcttcattgctcttcttttataagccaaggggctggaggatatttggtgaagcacagtaggtacaatggagagcatacaggagattgttccaatgacagtttcagtggcttagctagttctgattttcactgtgatgctgatgaaaatgggaaggacagaacatttccagaggaataaatgtagagaagacatggttttctgttggttgtaacatccggtgtctatttccctggaaaatggactctgggggattctcattcccatacccttccttccttccttccttccttccttccttccttccttccttccttccttcnnnnnnnnnnnnnnnnnnnnnnnnntctttctttctttcctttctttctttctttctttctttctttctttctttctttctttctttctttctctctttctctgaaatagtaccttaccatgtagccctgactgtccttactgtctgtgctcctctggcttcagaactgttaggattgcaggaatgggccactatatcttcttgtttctgtatttaccactgttaccgataagattgtaccagtcataattagactattattagctctcttgaatggaggaaaactcttgtggaagggggtggtgagatgcttttccatggttctaaactcagccttttctaaatcttaaaaaaagaaattgacagccccaagaacttggtgaccaaccgagtgacagaaaatacagccaccatctcctgggacccagtgcgagccaacattgacaggtacatggttcgctacacctctgcggatggagagactaaggagattccagtgtcaaaggatcagagtagcaccatcctgacaggcctgaaaccaggcatggaatataccattcatgtgtgggcccagaagggggcccgggagagcaagaaggctgataccaaggccctaacaggtactatgacacttcactctttccaagagtgagtcttcctctataaaaagggtgaggaggggaggaggagggatggttgctttatctgaagatgttttccaaagtggttctccattaaccttgcttgtgtgtgttgtatgtgtttacatgttcatgtgcatgtatgcatatgttcatgggcatagaggtcagaggttgacatgaggtgtctttctcagttgctatccatattatttttttttgagatggtctctctttgatttggctaggctgtttggtcagtaaagctcaatggatcttgtctgtctctgcctcctctgccctggtattacagatatatgttactgcccatggctttttatgtagggagtaaggatctgaacttagattctcacgcatgcatgtgaagcacttgacccactgagacttctcttcaggctcatagttctctttctgaggtagtgctttgacaggttaggtaggactgagggcacatagtatatggttgtataagttattcttccccagcctattggctgaggccagatgccaggatctctgtacctgatttgtgttagaaactggttgggtctcagctcctgctgggagaagaaagaaacaggaactgactgggcctccatgggacccaaagtctgtggtcccttcaggcattttgaacaaggtctatttatcttctctatgaccagtagaggtgccctaaatttcttgatggtttttattagttaaaattaagctctccacacacattaaaatctactaagaataaaaaaaatcacattggaaatatttgtaaaagaaaaattaaaaaccaaaccccaaacgcctttttccctagttccagactccctagaatctggctccctagaggcaatggatggccattgtcctccccttcatctcccccactactcttcctcttccatactcatctcctctctcccatttatcttctcattcctttactttccccagtttaaaacctttaaattatatttctctctccttcctttctccccctccctccccttcacttccccccttcactctccctctgtgtatgaatgtttgcatatgagcatgccacagcacacatgtggaggtcagagaacagcgttcaggagttggttctctccttccttcacgcaggttctgggattgaactcaggttgttaggctcagtggcaatcactcacgggcaagatgttgctagccccactttttccaaaatttaaagacagcaacgaagctatcaccttcctgctccatagaaacaggaaattaaccaagtcagacatcccaagtccacagccaggggacagtggttaatcaaagaggaggcagaaactgcctcaaaatatgttaataactatgtgctgatttgattctgaaggaaattcagtctctctatgtgatggatagcgaatgatccatgccagatgttaggctttacaaaatcaaaccaagctgatattacagagactcaaaatttgtcaaaacaacctaattcaaaacaacagctgtctgatttctattaaaatactacaattcagttctcagctgaaatgctactgggtagaaaatagcctggagatgtagttttgggaagttctaaattagaattgccttttatgattttttttccttcaaaatggaaatttccattcatatcttatttgcttaaaaatatgaacattctgaccagctttggtgggaattagtatttttgctgagctttcgttttctatggtacatgctcacatactcatgcacaccctttggtgtgtgctcacacccccatgcaagccctctggtgtgtgcttacatacccatgcacaccctctggtgtgtgctcacatacccatgcatactctctggtgtgtgctcacacacccatgcacacttccagtgtgtgctcatacacccatgcacaccctctggtgtgtgctcacacacccatgcacacttccagtgtatgctcacacacccatgcacaccctctggtgtgtgctcacacacccatgcacacttccagtgtatgctcacacacccatgcacaccctctggtgtgtgctcacacccccatgcatgccctctggtgtgtgctcatactcccatgcacacttccagtgtgtgctcacacccacatgcacatttccagtgtgtgctcacactcccatacacaccctctggtacatgctcacacacccatccatgccctctggtgtatactcacacacttgtgcacactctctggcacattctcatttttgtgcatgcccttgaatctttgctcacacatctgtgcatgccctctggctttgtctgtacccatcttagccaccattccttccccctctgtttctgagaaagagtctcacaggaaggtctctggcatcaagctctctgaaatcctcctggctctgcctcttgaatgctgatctggcaggtatgaatgaccacatccactttctttttaaatatctaaatatttaacatatatatttctgtactgggtatatattgaaggcttagatgcttaagaaataaacctttgtattttataccaacttaaatttatcccaagtccccttacacattatggtccctaatctcagtatctaagtctttggggctctctcagtactaggcataagaagatgccagtttttcattgcctctccagacaggtaggtgcctttgagtgacccctgtgttctctgtgcagggccctttgtaatctgtggctctcacctttccaagtcactcaggaagctccaccaccatagagaacctgtgtgccaaattagacttctcagatctgctgctcttggaatctactggggaaacgaggcccagagttccttcctctagagactacacaatgccgtattcctagaccctcttgaactctacaggtccatacttctagaggcaaaggctagggagactctgagcaagaacagacttgccagcagctggagggctggatgagaaatgggacaactcgcaggaggaaaagaaaaacagatgactgaaacttgtgcatggcttaggaacaataattacgtggcttctcatttacagaaattgaccctcccagaaatctccgtccgttcggggtaacacattctggtggggttttgacctggttgcccccatctgctcaaattgatggctacattttgacctaccagttcccaaatggcaccgtgaaggtatgaggacttcttgtacttctcttggtgccttctcttcccagcctccccgtagaacaacttgttggcttgacctgctgatctgtcacctgctaagggcagttatttgtgaacgccatgctctcggtgtaaggactaacctctgtgtctgctcctagatgactactacatatttgctggctgtgtgtattctccattttatcattctttttttttcaactgcttatttttaatttctagcggctcaaactcaaggtcttgtgcatactaggcaagctctgtagcgccaagctccacccgtcagctctgctgtttcctacttcctcctgctcttcctgcacttcctcctgctcttcctccagcaccagctcctcctgtatctcctgcttctcctgcacctcttcctgctgcacttccttctgtgcagctcctcctcttgctcctccccttctctatcttctcctccccacttcccctcgccctccctctccttcttctcctcctcctctgtaaattgttgggcctgcttaatatatttagattccaggaggactgagactttttttttaatctaaggcatttagattaatgcttcgcatgtgaatattttcttttgttttatttttggcatcagcgaggcttgaactcagggccctgtacatgtcaggcaagtgttctgcccctgaactatgtctgtccctagccctttttagtatttttattctgtgacaaggtctcactaaattactgagctgacttcaagcttgcactcttcttgctacagtctggaaagcagctcaggtcggagtctgtgcagccacacaccaggccaccaataaaaatccactgaataaacagttgaccattattttaagggctagctttccttgggaatctctgaagtccagcaaacctggccagtagaaaatcattgttctctctgtagcaataaacaaacagataaaaaaaataagaaagaaaaaaagagaacactttgacttactcattattacaatgactgcatctgactgtccgacttggagagtttagtccaatgtttacagagtaaggcatattcagggtttcttgaaataccaactacttcagtgtctcacagttatgatggccagtttgccttctttctaaaaccatgttcttaatcaaacattgccagcctactgctgatagcagttactatcgtcagtgcctctccaggtatctgaaggaccaagtccctaggcaacctggctggggttcctgtgttggccatgcacagcctcagttcccagctagcccttctagcagggtggactgtccatggcatggccctccaggaaagtgactgacactggctgggattctgggctgccactgagcacatggagcagttttaacgtcatgtgtgtaaatgctgctgacgcccaggctgctgggcagagaaactgagttgctcactgcctgttatcgcttttgtttataggaggtggagctcccaagaggccagcagagatttgaattgcaagacctggaacagggtgtcacctatcctgtttccttggttgccttcaaaggtaatcagcggagccggactgtgtctaccaccctttctacaggtaacgtggaatctagtcttttaagtgacaatacacagagaggcattggagcggccagggaggagtgtggaattatagagaagtaaaaatggggttctggtttgcaaaccagttcaccccacagtgatgtgactaaagagggaagtggggaagctaggagagtagacctaagacactgagggacatgagcctaacttaaaggtgcatttgcagagtttgatggaagcagagtgatggccagctggccttccttctaaaaacatgtcccatgatcaatatgtgagctaagaattggaaaaagcaagtagtgtaggaggcgatgaaataatctccagaccaagcgaattgtctcgtaatggggaaagctgcaatgtctcttctttcccgtctaacaacaccgtccttctgcttggtctcagtggatgctcgctttccacacccctcagactgcagtcaagttcagcagaacaccaacgctgccagtgggctctacaccatctacctcaatggtgatgccagccggcccatgcaggtgtactgcgacatggacactgacggaggcggctggattgtgagtcttaacggtgctcagagaagctccatggaacatcttgtttcttagcccagggagatggtcgtagctgctccatggaggtcctatttcatctctgcctatggagggaaggaaatttgatggcttgcaactgtgtggagggagatcttgtcccattgcaagggcttaacactcactggtcacagaatgggcttggttaaaccagagtgaaagactatgagtttagcatcatcaaaaaatgcctaaatgtttctaaattctaccctcttcaaagcactttgaaaaccatgaccttcacatgatatgttagtgtgagaggattatcattcttgttttgcaaagggggaagctgaagcttacagagaaaacatctttggttgagtcagtcacacatgtcagtgacattgctgaagccaccattccaggagacacatatgccagatcctcgatcttcctgatggcttgtgtcaggtcacacaagatggaaatacacagcttctttgggggagtcagtcctttgaactagggcctctggtttttggtttacaccttggctctgtaggacagaaacaaaatattagggctttgatttgaagagtaaggccagagctagggaagcttaggctgtgtctaagctgtcccagtctgccaggaagttttactgtcttgggccactgtctccttgcattctgagagttctttcattggttgctgattcggttctatgatgaatctttgaagcttgccggtggattattcgatctttctctcttacttggcttctccctgtgtctgagccaattgagggtcttactttctctaatgaaaggtagctttcacctgctgtacattggaaccaattgtgggagagagaaagcatggcctcatagtgtcgagctatgttcatttacacgttttcttagtgctctgggaagccagctagtttttgagcagccacaggtaaaatgaaatcatctgacgagtggcaatgaagagcacagagcacacagtgtctgcccagtgacaaggaatagtgggatgtctgtttcatccaacaattggttggatggcagaaagtcttgatttataaaataacacaacagattgtaacatgggaggtctcccacctaagcagccctgtatgtctgtgcctgctgcttttcatcatcaccattgtacctgagctcagttccctcaggcccacagcccaatttaccacagttgtgcttgtaattgaccactggcaggatgtctgtactgtttagtgtggtctttttttgaaagcaaagcttgtacaaggaagggaccatttatcctagggcaggagagagaaagagagagagagagagacagagagagacagagagagacagagagagacagagagagacagagagagacagagacagagagagacagagagagacagagacagagacagagagagagagacagagagggagagggagagggagagacagagagaggtagaaagagagagagagagcagagagagaaaaagagacacacagagagaagtagagagatacagagatacagagagagacacacagagagaggtagaaagacagagagagatggggggagagatagagagaaggagaggtggtggtggtggtggtttgtctccctgcacaacccatgatatagtgtacaaatatttattgagtacctactgtgtgtcagacatagattaaccatccaggaatgaacaaatgagacgaatctctgacttgctttctatatacccatacaaatgagccttccttaaacactgtcagttatagaactgctgaatccactcagtactgtaaccagtatcagtctcatcccccatccccccacctcacgttgtttgctccggcctccagtaggtaatatatgtagactgtacagaggtctcctctaagtcaggagctccacaagataaatagagttctaaaaacttctactatatatttcacttactgtttggggtttttatttggttcaagagtcttctaactcttaaagataacccaggcttctatcaagcttttaaaatccttttatgaaagttgttctctggtccaggctgcaggcacctaatttgatgaacaggcagaaggactttgcccccaaggctacccagacagccaggaggaggctggaaagaacatcagggaacacttaaaagtttcaaatctttccatcttggaagtgtaagggctgcaccaggggctctttccacagacagttcaatgcaagtttgatcttcccctcctgatttagtgagaaatttctccaggatgatgacagtgctggattacagaccccaacatagatttatttccttttactatttttttgagtagttcattgtagagcatttaaattttcaaaattgattaaaagcctcaatcaaagccatctgatcaagatgtataaattatctgtgtgggtcagtatacttaaatatgacataatacaatggaaatcaacaattattaagatataataacagtttattgttatctgtttgtgccagactctgctatggtatgacttgctgacctcactgaagacttcctctaagctctgaggtcatggggcctagttatactttgacctgacagttcagagaagcttgggctgtgggcatagctcagttggtagagtgcttgcctagcatactcagagtactgagattgttctctggtagcactgaaaactggacatgatgctacacaactgtaatgttagcacatgggaggcaggggcacagggattagaagttcaagatggtcttggctatgtatgagttcaaaaccagcctgcacatactgggacattttaaaaatactaagcaaaacaataaaaccccaagccccaagcatgctcactggagatagagaaattggtattgcacatttcattagaaaggcaggctcagaatcaatcccagccttggttgaggatgctacttaacacagtggatagacacataaggaatgtcagcaccatgtccagcctagattgcactgtgagacaagaagaaatccgagagcaggttgacacaggctccttactaggaaacaaatctcccaagtgttcagaaatactactgaggaaatatacctgggagagctagactctcaaactttttgaccaacactggactgtgtatcatccttgtttgagccaccaaatggttgtgtggatatggctaatttttttggactttgccatctgtaaaacggcattgttattttttccctcagaatcaacattcattagatgtccggtaaatggttgctatgttaagcccaaaataaatgaagaatgaaggaaaaaaaaaaaaaaaccaatcaaccaaacaggaaaaaaaaaaaccccacccaatccaagcgggggaagctttaacaagtgggcaacagggagaaaaggagctaagaacagcgtgctaattagctgtgttacttctgtgtgcaatgacttgctgtgattttccctaaattcttcttgtcagtttatgcccatttatgggacatttttggaggacatgtactgttccatctagccttcccagaaacgctgtggcagacttctcttccccactcctctctgctttacagtgagctggctgggatcagaaaccaaaatgactgactcactatcccccaggccagaaagtgtctgtggctgacttggagcctggaacattctcttcccatgggtgtctttattcagcacctcctcagccacagagctgtagtggtgctgaagggagttaatggtgagcggccacgtgtgacctcagctcgtgtcacttttagagaaaaatgtaaagattccacaaccattaggtttccttcaccaaattcaaggctatagataatagaatttcatgttggggcttcttcctttagatcagtacaggggaaacagaggtagacatacaattctagactttggtaagtggttgctaatcatcactgaatgggccacaacgacttttagtttggtctcaagttcaagtggaataatagcattactcttttcaatactgtgtgcaggtgtgtttgggtttaggaaagttttcgagtttatctcatataaaggagtctgatttactcggagggggaagtggccttcttttcccgtgtagagatctttttgtatacaaagcagctcatctttctgaaacagaaccaaatctctagttctcatttttcttactcctcagcccagcccagcctgcttcctgcctctctctaacccagcccttgctgaagtaattggggattttcatgtcactaaatcccagggagttttgatcttacatcccttcacccctcatcagtactggggactactgaccattatttctcggttattacacaatgttttttagtttcctttctctgtccctagctgcttcttctctccctaacgagatcatccatgcctatgagcgtattggaggtctccaaggattgatttcagttctgactttctttgtatatggcagcatctttccttcctccgacccccgtactttcactttgaatctcactggatccttgtgttcattaggacagcatgattccacagcaatgacagtgacaagccactctcccactcccatgctctaagaatacacatgcagtcacttctgagtgctgtctcagcagttcaggttgcttccgatttgtggctaggccatcgcagcatgtagcatttaccaatgtgcatgccagtggaagacagtgtggagaaccccacctactctggtcctcctgcctttagcttaggaatagtcacatgctttttacttacctgcaaaagaagttgaaaaccgtcctgtgttcttgggacaaggagagtgaagtaggacttggtgaactcctgccatttctcccagatacacttccaacttagagagcaagcctaggtctctcatcagcaccctacccccctctgctggttacatgaaaccctgcttcaccaggaaacctcagaaagaattaatactggaccagggatgttaatcagtggtagagtacttgcttggcatgcacaagaccctacatttgattcccagcacagctaaaaggaaaggagaacaaacaaactcccaacttacacagtgtccccaagtgagcttgatacagttgcaaaagatgtccctctcagaatcttccttctgcaagaacagctgagtaaataattatccagtgctgcaatcaaaacttctatagaacaggacagccctggtggggtggggtagtttctcaagtcctaaaaacatggactggaattccaacaaccgatcaactcatgtgtatgtgaactcttagtgttgacccactttgtcaccatgactgtcaagtttccttctgccgacatctgtctatcttcagggtagtttcttgtctaactcaccatccactgtgaacagcacagtacagtggtcttcaaactggttaccatgtcttccactcctgccactggacaggcattctctacactgtagctagaaggatctggggaaaactctgtttcctgtttagtcttccaaacttaccattgctttttacaatggaccaacatcttcaaccaaactgaatcccaccagggctgacctttgcctgttttccagcctcctctcctagtccttcgtgacgagcacccagaatcagggttagcagccttcctttctcttcttgatgctcctgctaaccctgcaagcttctgatattttcccaggagagtcctgttggctcttgcttaggtgcagtcccactgtatctttcttcatagctcttattgttggtttaactgaatttttctttgttggattacttaactcatgtctatcttatttactggaatgtttgctccattcagacaggaaccatttcagctttattcattttggccatcaccttgtgtgttttctacttatacaggagatgctcctgctgttccacaaatactaaatacttgctctgttaggattcttgagaataaaaataattcctcctttcaaattgtttaagtggaagataaaagacagcatatatagaggtcatgctccaaatgagttggaatggttgacagttatatgccacagacagtaaagatctggaatcttctatcatacacaaccaacaactagcaatttatcaccagctttcccaagtttttctgtgctctaggattaaaatttcttaagggtggaagtgttccctgttaggtactatacattttcatacctggaatatatattttacctaaaattcttattaatgtaatagacagtatactcaatatactgagatataaataaaaattgcttttaaagaattaagatgtattattgcagggtcagtttatgtgcaggtccatagtgtccccttgcctcccagggccacctggaaaacacaactaccatttctctgcccctcaatagtatctgtacaatggcagagcaaagcactcatttcctttttcaggtcttccagagacggaacactgggcagctggatttcttcaagcgttggcggagttatgtagaaggttttggggaccccatgaaggagttctggcttggtatgatctcagagaatcaggaaggtggggttgtggggggataatatccctcttgatgggctggtcagggcatttatggaagcttcccattttcaaggagccattcaagggacagggacactgtgttgtattgggaagggtctggcccagcagggatgggtgaagagataggactgcctgaggtggcttttattccatacctaagctctgcagaatcttctctgagcctggatttcatataactgcagtagaaggacagttgatggatttggatcccaggctctcattaagaggatgtaccagtggtccctgtaattctgctggtacagccagacattaagggcccattttccctctgctctcttttggagcagatgttcatagagagttaaatagccaataaaacatctactgggaaatacaaaaatttaaaaaaaatcgaatctggttattcagtgtcttccagagtagatgatgtttgtgcttagctaggtacagagttccatttgaggtctgaggataggcagttatttcatctattcctttacttttgagatgtgtggacacacaaaagagggctggcttctgctttggagaggtagagccagtgggcagattaccccaatactttgtcctccctgatggcatcccacgatgtcattagcattgccatgccaaagaaataagggtgagaatattagcaccccaggagaaagagttgggaaagctctttattagcagagaagattaaatataaagatgacttttatctctgactgtctcagatgcagacagtgagaactcttacacacaagttgattggttatttgaattccattccatgtttttaggacttgataaactacataatctcaccactggcaccaccactcggtatgaggtgagggcagacttacagactttcaatgaatctgcctacgctgtatatgatttcttccaagtggcatccagcaaagagcggtacaagctgtcggttgggaaatacagaggcacagccggtaagagagatgtctcactatggcagtctccttgttaccatcatctaaggattgacttgccatgtgccatggatgtgggctgtgggatactggtatgcagaggttgggtgtcttcactaacaatgctctctgaaggggcttgagggtaaaggaagcaagaataatttttaaccattaaactggattgtttttatatgttctttcccccgcacctgaatctccttttattctcccctggtttaggctgtttatacgtttttgagcaattttattctgagcctttcagtgaacttccatacacagtgggactgttatgcttgtgtgtgtgtgtgtgtgtgtgtgtgtgtgtgtgtgtgtggtgtatgtgtgagtcttattataacattttgtggtattttgctgtgtattaagacagaaaaatgaaagcaccaagtcaagcagtaagaactttagatctcattaacttacacgacagggacaacacaaagatgagtagtttagccaaaagcagggactctttagcctccattagctgctcactggcttttggccagtgggtggtgtattcagttgtaccgtgaaaggaacacaattaagcatcatgattgaactactgcgattatactgacaaacattttaagaggggatggtgtggttgttggtctaatatggatattttaaagatgatatttatggcttctctgcctttggtctgattctgactttgcttgtagtcatgtctaagtgtgttactggcaaaattagctgattttataggaagcacatggaaagagaagaataacttttgcagaccaagtggtatggtaaataaagagctaaggaatgggaatggtgggtatatcaaggacctgagtggctaggggaagcttcctggaggacatggggatgggattggctcagacagagggccaaacacagacaggaggaaaggaggggcttactacatctgagggtacccaggaggaatagaggaccaacccaaggcaaacagattgctgttttgtagggcatctcaaaattgtatactcaaggatctctgaggtctggggttatgatctgaaatagtcaactacgaatggaaaatgttgaggttctttgctatgtattgtaatgctaaatactggccctcaaggcctggttgtcctaggaatgagagaatctttatgtagacccaagtgacacatgtaaccttgacccccaagttattcctgattggtgaataaagaggcctacaggctatagctgggcagaagataggtgggtttttggttttggggcttggggcttagttttggggggcagggaccataaagggggggagagagagagggggggagagagagagagggagagagagagagagagagagagagagagagagagagagagagagagagagagagagagagagaggagtggagagatgccatggggtaggtgagttatgaatacatggccatcagggctgatgactggagttaagagtggcccagatgcaacatggcaagttaatatggtcattgatagagtagataccaaaaccatagagggtaggtatctgttcagctctagtacataaggcttattataaatataaaggttgtgtgtattttatctgggaattgaatggtcaaaggtgaggtagaaacctctgatagggattaaataatttctataacaggaaaatttctttgagttctataatttcatttcgtaaaaccataatataattttgctcatttcatagtaatctagcacaaaacctagtacagagttagtgagttttaaaacaatgagatttccagcaggattcctcatgtctaatctcgaggacactcaataccttgataggaatagatcctgagtttatttgacaagggactatgggagcaggtgggtgcctgtcaccaaggtggttgcacttgaccaagttggaactgttcaaggattctaagcaggagttacatgggaaagagtgtgcaaggaattgtttctagggaaaataattgccgtgaaacgcaccacagctaccaaggtccattttgctttggattcaccccttccttccttagatggtctgtatttctctgggctagagatgggctgtacagcctgccttccaaatggcacacaaaccgtgggagtcagctctgaaagccaggctactgggaaagtgagtggaaggattcaacacattctaaattaattgactctccctaggtacattatccatattttcagtctgactaggctctggtaactcctgttttaaagttgctcaggccaacgaggccagtcagtgaggatttttttttttttttggtttttgtttttgctttttgttttttaattcaaggagaaagaggcagctcggatacaactgggaaacagactgacctttgttcatgtgattatcagggtagttacagaatgatttaaataatcataatggttattattttttaagacaggctctgatcatgtatcccaggctagcatgcaacttgtaataatattcctgccctggcctcttgagtgttggaattaaggaatatactatcacacacaatgatcataataatttaatactaaaataacttaaattcatagtctcaggggacagagcccattacataactcttaccccacctttaaataaggtcaggttgtgtttctgatggcttctaaatgatctctaatcatttagaataacaaagggccagcaggtcagccctcagtttcctatttgggcctcctcctgctccggtcttagtgtacctgtagtctatctgactatctttcatgctgtcagtgagacttaggctttcctttcaggttagagtctcaattattacaaacctcatacctgagatcttcctggacacgtttgaagtcaggtgtttctcctcggcttccatgtcttctgtttcccccaaacctggcatccttcctagcttcttggttgagacttcattcagacccatcttttcagtttgtccctttctttccctttcctttcttggaccattagacattgccttttctgagtctagttaacataattcagcaaatgagctgatgctaatgggaaagggagtcaacatattcttaaattactgcgactctcctcccaggtaccttatttccattttaactgtgactagggggtaattcccattctaaggttgttcaggccaatagggccagccagtggaggatgtcttttttttaataggaagccttgggagactctcaaatcacatagcatttaggcagccagctagtcttcctgtgtgtgccgtcagtcagtcctaccttgatgtcctgcattacaacagtggggtcagtgccattttagctttccttgtctatgctttggttcagatgagggttttaaaatctaggaagcttcaggctatgatgcagtatagggtagaagacagatgttcaaatggaaggtgaaggtctccctgtctctgtgagtgccatctattcctgtgtctcgcttcattaatgcttttattacaacagagatgcacagcattggtggaaaggagaggcttcaagcttgtccccacctcggactgtccagctggaccgatagcttcccacttccactgaagtcatactgctttttgtttgcttctgcttcttttccttctcctcctctcttctgcttctcctccttcctcttcctcctctcctcttcctccttctcctctcttccttcttcttccaaaggaaacttcagcaaggcaatagaatgttagcttaatttctgatgttgaatcttataggctttcctatgagtcccactgttgggatgcttgcttatgtagagatggcaacacaaacatagactctgtcagagtttccattgggctacccaactttttccaacttatctcatgtccctcttgcatggggttcagccattttagggtacttaatggatgggtcctcctcctggggacacttggcaaagtgactgaggatctctaacaacacttagtagtccaggaatgacaatgtctatatagagctgtcttaacccaaagccagtgtttcctatatttttttaaaaatttttcttaggtattgtcctcatttacatttccaatgctatcccaaaagtcccccatactgtcccccccactcccctacccacccactcccacttcttggccctggcattcccctgtactgaggcatataaagtttgcacgaccaatgggcctttctttccactgatggccgactaggtcatcttctgatacatatgcagctagagacacgagctcctgggggtactggttagttcatattgttgttccacttatagggttgcagatccctttagctccttgggtactttctctagctcctccattgggggccctgtgatccatccaatagctgactgtgagcattcacttctatatttgctaagccccggcatagtctcagaagagacagctatatcagggtcctttcagcaaaatcttgcttgtgtatgtaatggtgtcagcgtttgggggctgattatgggatggatccccggatgtggcagtctctagatggtccatccttttgtctcagctccaaactttgtctctgtaattccttccatgggtgttttgttcccaattctaagaagaggcaaagtatccacactttggtcttcgttcttcttgagtttcatgtgtttcgcaaactgtatcttatatcttgggtagtctaagtttctgggctaatatccacttatcagtgagtacatatcatgtgagttcttttgtgattgggttatctcactcaagatgatgccctccaggtccatccatttgcctagaaatttcataaattcattcttttaaatagctgagtagtactccattgtgtaaatgtaccacatttctgtatccattcctctgttgaggggcatctgggttctttccagcttctggctattataaataaggctgctatgaacatagtggagcatgtgtctttcttaccagttggaacatcttctggagttttctatattttgaaacaggcttttaatggctggtgtttgagaaaaaagaattaatagattcacagagaaaaagaaaggctagatgctcaccactaccctttccttgctaccttcagtcccaggggacagatactccaggcctagtctcacagccctttgtctgaatgtgactcacaggggctatgatgtttatggcttctcctggtcttaggtcttaggtggaggctgcagaatctttatcattctttctgcactataaagcactggaggatactcagagtgacattttgctgagatggtcagtcaccagctcagtggctatactggctggttttgtgagtcaacttgacacaagctagagtcatcacagagaaaggagcctcccttgaggaaatgcctccatgagatccaactgcaaggcattttctcaattagtgatcaaggggagagggcctagtctattgtgggtggtgccatccctgggctggtggtcctgggatctataaaaaggcaggcagagcaaaccagaggaagcaagccagtaagcagcaccctctatggtctctgcatcagctcctgccttcaggtgccagctcttcttaagctcctgtcctgactttgaactatcatctggtagtgtaagccaaataaatcctttcctttctgacttgctttttggccatcttgttttgtgtgttttgttgcagcaatagaaaccccacttaagacagtggctataccttgagtgtgggtttagaccttctatgagtcttctataaccctcccaacccacacctaagaacagtttccagcaaagccaaagaacagggcattttgaatagggttcattagcagtttctcctaacactaatatgagggagtctaagcatgattggcctaactaatttttattcattatttctgagcttctatgtagtccattcgggcctcaaacttgcatttctcatgccttagcttctggggctaaggagtgtccatcacacccagatttaacttggttttacttagggaaaataaactcattgattcagaacaatgcctcggctagagccagttattttctgattcatgagcatagtcattttctatactctgaacaataatttggctttagtttctcaaaggtagaaaatccatattcagaaataataataacaattaataaaaaaaaatgttccaaacacatcaaagctcacttcctttttctagtccagggtccaaggttaggataactgaagatatcttcaagaaagcatttgtctgggtcttggaaaataagctctgggaacttcatattcagtctaggaaagctgtgcttattgaaagaatgttactaggggagccattgtgtgttatttcaagctgtagttaactgtctgtgggaaatctggagggaggagaaaaacgtaaacaaataaagccacaggctgtctttttctttgactggaagaaactcatggaggcgtggccatcttggtgtcgaagcaccaaaggatcctgcctttgctggtcaaggcatgaagggaacaaggttgtgtttgcagacttggaaggacagattgctgctaccttcctgtcttagtgtttccattgctgtgaagagacaccatgaccaaggcaactctcataaagaacattgaattggggctggcttacaggttctgaggttcagtccattatcatcatctcaggaagcatggcagcatccaggcaggcatggcactggaggagctgggagttctacactttgttccaaaggcaaacaggagaagactggctcttctacgctgggcatagcttcaaagcccacccacacttcctccaaggccataccttctaacagcaccactccctatgagccaaacactcaaaacaccatacttccctttgcacaagggtctattaattttatgctagggactgaactggtggccttgatttcctaagtgttcgcctacctcatgccatatccccaactcctatgaactctttgcgtacctgctctaactcaccctaacagagttcttaagaacaagaacctcttctgctttgtattgccagagccaagcatggggctcacccatcacagggaagtgtacatcatctgactaagtgtgtggatgaagctgcagctgtgccaggaccacatgaagggctgttgaagaacacatggctcccagtattttcacttctgtatgcctgggttaaacctagaattcacattttttgtaggttctcaggtaacatcagtgatttaggttttggggactgcctccagaactattgtcaaaggttatcagagatagactgcacttactagtaggaatgaagccctctgtgggagtgaggaggccccaggaaatctgtgtttcataaagaactgacattttagaatctgaggaccaacagttgagtcttgacaatctcagagtcttggtgtctgggaccttcggttgctgtaggtgaacccccaggattttatttccatatgggattcataagagcctggcctaccttgcaggcctgtgagagtcacagcaattagatgtaaatgtgagtgtcattgttgcaggaggggaacttgattaagcccatgattgatatgggctcttattgccttttatgaactgaaaaagcaagtaaacttctaaatggatgacgaatgtggtaggggaaagaggtgccatatgagtgaagtaattaaagcagattccagacaagatgtaacgaagcattaaattgtacatgcgtccccagaagggctctcgaagttcaggtgtgtgcatgtgaatgtgtgtgtgtgtgtgtgttggtaagtgtatgtgtgtgtgtgctcggatgaagggaagataactaggaatcttcttttatagtagagttgagctagactgtaagggaggtgagggtttgaacaatggagggcagagggcaaatgggcctgctcaccacactagtagagacaatggggttggaggttgtgcataagaggcagcccagtgacaagcctgcaaagcaagcaggatgaaccatcttctccatggtagtaggtaggatgctaagcttaagactgtgacatgggtgctgccacagggactgggagatggactgagatccgggaaagttgttgggtgaacacatgtcctcagagatgaaaagagaccttggtggccgctgtgaagaggcaggaaggatgttttgagaaagtaggttagatcaagggtatgttatccaataaagtgaatggattttgggtcaggggcagcagggagaatggtcactgtagtaaatgcagaaggacacagagtgtttatatcaagtgaagggtagtgagaccttccaagtgagaatgctgttgaagttgatggagaaacaggtctggtgtttgagggtcaggttagcaaggataacctgttcatctatatcatgttccattctgagttagttgtgacgacctgtgatacacaactgaatccttggtgttttggtcctagatatttcctgttgggacctcttttctcatagttcttgactcatagttcttttctcatagttctcatagttcttatctctcttgcaggggatgctctcacctaccacaatggatggaagttcacgacttttgacagagacaatgatattgccctcagcaactgtgcactgacgcatcatggtggctggtggtataagaactgccatttggccaacccgaatggcaaatatggggagaccaagcacagcgaggtaagtggcaggcaaacagcttttctatcacaagctttgcctgtctccactcccaaagtgatgtcatcctggtgagattgatagttccccctctgtctgaagctttcagtcaggccaggagattgtgcttcggtcttcatggtgtcaccagacaatggacactacacagtgtacatcgcactatcacacaactattcagctgcatgggagtgactcatcactgatatatgacctatgatgtgaatcgcatgctgtctcatctcattattaagtttcttttgtaatatttttgagccagggtgggtctcatgtagcctaggctgagctcacacttgtcttgtagttgaggaatggtcataaactcatgatcctcctgccttcgttttttaaattcttggattattataggcatctgtcacatctggctaaatttttgttgttgttgttcatctgtttatacagactcttgctatataacctaggttggccttgaactctgaatcttcctgccttagcctcctgagggttggggttacaggtgtgcaccaccatacctagctatcagaccctgttatggatcaggttgtggtaatgaactaccacagattaggtggtttaaaaacagacttgcgtatcttacagttctagaatttcctaatccaagaccatggtgccagccgattcatttttgatagagccttgttacttggtatggagacagacaccttctagataaatcttcacgtgacacagagagaggccatctgacctcctcaatgaacccccctccctgagagctgccccttaatactaccaaattaattgggccaataaaatttcaatacgcagaatttgaagagaacacaaatattaaatcccaaaccagacacttggttgtcttttctagttgcctctccattatagcagagctgtttctctgggtcccttgatgactaggtaaacaggttcggctttgggtcagactcagccttggctccactttaacctaagccaccaagagcctgccacaccctgttcttgtctctgtcaggacagtgttcagggctcagtgtatgtgagggctcctctcttgcaaattttcctgtctgtattttctgggacttccatgacccttgtatgtcatggtgactttttgccagctacaggttatctatgacccctcctggcttcctgaaaattacacttttctcctattcatgtcaatctcttgccctccataaacctgccttgggtttctaatttcaagtcctaggtcctgatcctggctttcaggcagccacctctctccagaactcacacagaccaatattactgtaaatattagcactgctcaaatccaggtgcattcttattactgtagttcttaccacacaatcaggactcccaatccttatgtgatattttttttaaagggaagaagaaatttgcccctagggcaatgaagaaggttggcccaatgaatcatggtggcagcatgtgggccgaccagggaagcctgtgatcagagatcaaatatttgaaatgagcagtcagcatgccctaaaccatccctgtatttgctaataaaagacattcatctggctaatgtgcttctctcgctctgcaagccatttagcttcttgtttattatttacttcacaaattaaaatacataaaattggtcacttgggctctttattggccaggttgcaaggttattaagtgaattaaatattattgtgctcaccagtcaaaagacataaagtgaaatttagttttcagcaggccatttgtcaccccagcgctaatatctaaacagtctaaattgaaaatgattttacacaattggctaattaatacgtttatttttgccttttatttttttgaaaaagaacagggtacggcaatggctgattgactgctctctgcctaagttgatcgtcttgtcaaccttgtgttctggccttccctacatcttgggcacacaccccatcttcctaccacagaggtttctttctctctccactcagcttgtcgaataccaggagagggtacatgatctggaccttgtattttggatcataacccattactgctagaacttcctcttctttttcttcctccatcagagacacagtgatttcttgttctctaggattcccccccccccccacaaaccatcttactcttctcccaaacacttgatgtttgatgtttgttttgcagggggtgaactgggagccatggaagggacatgagttctccattccttatgtggagctgaaaatccgcccgtttggttacagcagagaccgtttctctggcagaaagaagcgctccataggaaaagcaaggatgttctgaaggcttgtctgagctgtcttcacaggagacaagagaaacttggggttggcggggtagatggtgcctaggaagctgaagtttgagggatgctcatagcctccgacttcctagattgctgggtacacagtgctaatgacgtcatcacactttgacctttagaggttccttccatgtcatctgcaagtttgcctgtctctactgagggcttcattgttggctttcaggagccaacaatgttgtaactgaacagtacatatggatagaacacgtgttggaatcacaaggtttttcagcccatccttaatgacagatgtattgaattagggcaaaaaggtgaaccatcctgtagaccatcaattggaaatctttagaaattggtggatatctctgtatccatctgataatatagatctttgtagaaaaaaaaaagacaaagtgaggttctgatcccctgggtgtcagagctgaggcgacctgctacttcttgtctctcctggacctcctggtgtttgaaggaaatgtttatatcttactacttttaaacttcctgtgtgatgaagaatgaagagactacaaaggggccacgatgcagtcatagttaagttctgactagtctctagcattctagagaccaaagctcccattttattgctatttttaactgccccttttccagacatttgcataagttctttcatagatctgcatatgttgtaaataaatttgcagtcatttaaactttaaataacccatctctctaaataactggtcccctcagctccccccgcccccacttcactcacctccatgcctctcccctctcccgggtccatcagccctcagcctccctccttccctgctccccgcactggaagcttcctcacatcatctttcttgcgtgtttggtgtcattttggaaagttttctgtaaccaagtcagtgacctttgaagtaacttaaattcctactcaagaaaacacaaataaactgtttgatttttaaaaagccgtctcttgttattttctccccagagagatggcccacaatagcaatacactcaactttttgcaggcttgctaagcgcgcttaagacattgtcttggtcagtgttctgtggctgtgaagagacatcatctccacagcaactcttataaaggaaagcgtgtaattggggctggctgacagtttcagaggcttagtccattatcatcactgcaggatgcatgggcggcacacaggcagatatggtactggagaggtagcagagagttccacatccagatgtacaggcagcaggaagggagagagatactaggcctagcttgggcttttgaaaccttaagcccccccccccccagtgacacacttcctccaataagactatgcgtacttcaacaaggccacaccttctaatccttttcaaatagtgccactccctgatgatcatacattccaatatataagcctatgggaccattcttattcaaaccatcaccggctagattgtggactccctcttcagatgttatgactcattctaactgctcctaggattgctggcctctctatgtctgtgcagatctatagccaaatcagtgacccatagtctttgttctggaggaggctttgatggccccagatggcaccatgcccatcttaggttcattaaccccagggtttggccactgaactgacctgtgtgggagactgaagctgttttagcatctttttgcttataggtcctttgttgccatggagaaatttcagctgaccttcaaatagtttactctgagcagaaaaggaaatctgggaagttcatttcagagtgtttatagagtgggcaacatccaagcccccacccttcctgcatgctgccccttgctctagcatggtccgtccagcagtttattccaagcttaaaggaggccatcccatgcttcaggatggcccaatgtgaaaggggacgtgagaagtgaggatacactagaagccaggagcagagcatctgtcctacaaacggcggtaaagtttccaaagtgttatctattctgtgcatacacaaggcagagaggagcaaccaagctactggccctggtcaactcttagaacttctggaagatagaaaacaagtcaggacggtggtggtttaaggaaaaagtgagtcactaagagagagagagagagagacagagagagagagagagagacagagagagagtgtgtgtgtgcatctaatcccaccacaaaggctttagggggctgtagtgatggcatcagatctagaaatgcaggtccgtgggtgtgggggggaaagggagttccggtgctctgggcaggcagatgcgggtggactgcttttcacatggccctgggtgggcatctggctgtgttaagccactgaccccacatggcgggtggtggacaaggggcagccccaggtaccaggttctcagcctctcgtatcccacgctggatatggtggaggagctgagaacagaataggggccccagcagcacttggccctggagatgaggggaggaatgggcagggggaggggcgctgggtggttcccacaagggtgagagtccttggtcaggtctgtggctggagcacaggatggccttctggcgggatgttagacgcggcccatcccatccttcaagcacggcgggccttgataatcagagacatatggttttagagctttattgtagaaaggcagggagaaaggagggaaggtagaaagagagagagaccagccatggccacgtggagagaggggggaagggaaagagagaaagagaactagagagtaagaaagatgagggcttaagagagtgaggagggggccaagcagcccctcttatagtgggctgggctatcaggctgttgccaggtaactgtggggaggagcgtacctaggctatagtcaggtaactgtggggtggagtctagccagaatgccagaagcttgggacatggttggtgtgacttagtcacagaattatggacagacacctgattctgtgaatgtggctcgcctttctgtcccttgtagatttctctattgggtcactggagcaagccccattcaaccaaaataggctgcccatcacagtcccacatagaaagacagactgagtcatgagggaagcagccagacatctgagagagccaggctgcacatggacagtatgggggaggcagtgtggcttctcagtggttgaggagcccagggagccagtgggaaggacaggcagggggtcattgctgcaatggctgtcaggtcacattgccattcagagccagcatgagctttgatgtgtgtccttctgctcattgccccttcacaggtcccattccagtgggtctctagtgagttctacgcacctgagcttttcaaagttccccaggggcctctaacatcaactcaggggtgagagtcattgttcccacataagcctttgaatggcggagagctctcagaggcttcgaaaccttgaagtgacacgggaggcttgtattttggaaatattagtttggtgacaggttgaggagggccacagagtggggattttgaaaactacttagaaaattgtgtgtgtatgcatgcgtgtgcatgtgtgttcacatgtatggacaagtgtgtatataggacattaccctgggtctccttttgctactttctacttcatttcctgagacaggctcttattctgaacccagaactcgccgatgtgggcagtctagccagccagtttgttctgtctccagagtataaggatttacttcaggtggggctgccacgcccaaccatcaagtcctcacacctgagtagcaatcacttcttccacggagctatctcccggcccttgtgttatctttggttgacacaaatctgtggggtaaagcatgccattccaatatgcacgtatatgtgaagtggtcagcgcaggtgacaggcatctctatcactgctgacatatatcataccttggtgtggagaacatgcatagacctctctaccggttgctttggaatacacagttagtccttgtcagccatagttactccactgtgattcagaaagtcagaagtcattccttctgtctgtgccccttgcccatccacaaggggtgtggtctagggggaagtggggaggctcgcagaccagctcacagctgctgtaatagttctccaagtagtactgagtcccttggtctgtgtcagaaggggatctatagaatcagcaggagtgagggaggactggcttcagaggccagcctgtgaccacagagcttgaagatgtttatgtgtcacggctgctacctctggaaatggcttggcatttgtgtttgttgagtttgagtgttccgttttataacttacaattattggggattcaagggctactgaagctggaatatactgcaggagagagtgaggaagggggagaaagagagaaacagaagaaaataaagaaagagagagaggcagagacagacaaacacacacacacaatttaggtgtgggttgtgcaaagagagagcatgcagacaaggaggcatgcaaagaactagaagaaaacgtggtgaaaagctgctggtgaaacttagttattagaaaaggtcctcccatttaaaaaaaaaaaaccaaaaaacttacatgtcttcactaccttaggtcttccaccagggtcaaggagaggatcaacagagatgatgggaaccaatcaatcaggttggcgcctgcagtctggggcaagcaggctgctatacccactcttgccagtagatggcagtgttgtcttatcaggtgcctctcaaatcaagagagactctctcccacaaagggaggttctggaagggtccccacttctctgttccttcctgggtaactctgtcttacccagtggggccaagtcagcagccaacctgcacttagtggtttctccggcagtgtttctacctggattaacacaacaggtaagcaggcaccccctggaaggggttgcctagctcattcttggttgtgtctagcctgcaacctctctatcacagtgtgctaggctggtcagtgtgtagaaagttccagggatatttcaaaactcttcctaaaatgcccctgtgagtgaattgtttctgaggacactttaagttccagttccagtgttatataaataaggttaccaggttagctcataaaaccctgctcatttatagaagacaaacttctatataattatatataaagacagcaaagaatagttctgaagcctgtaaactttagctcttattatatttggcttgccagcttttttaacgttttaaaaatatttattttagaattacttatttgattttatgtgcccaagtgttttctgtctttgtatatgtatatacacaggcacatgcttggtgcccatgaggctagaaaagaatgttggctcccctggaactggaattacagatggttgttagctgctatgagggcctgggaaccaaacctgagacctctgcaccaacagcattcgaaacttttgcatgctctttttcctcactaggagatatgaagagcctgttgtaaggctggttttctgtgaattgtcaagaggactatgacagatcatgggtggaagagagagaaaggctggtgaaagacaaggaggttgctggagtgtgggtaattccatgccttcctccatacatttcttttttgatttctagaacacaaaccatggttttccttcattaatgacacttaacttgagcacttaagccaggctcagtgctaagtggtttttcttttttttttttatgtatttctccatttaatttctgaagataagttttaatatggaggtaacatcacaggcataaattacatgtgagaactggtgtgggtcccaggatactggacagccctagtcctcagccccagccctcggtgctcagggactctcgtctattctgccaataatagcctcctttctccgctcacccagtgcaacactttgccagcctgacttgatgccagtcttggtgggtgtgttcctctgggaaagcgacaaacacattatatggttgtggtttgttcctttaggccagttgtgacccttcaggacaaatactctggtatgggctcagtggacttggcacctcgaaagagctaaaatcctttgatatgcatgccctgccattactgaataaatcgtgatgcttggccccatgggaatctgaaaacaattcaataagttgaacctatgaccgatacagtaagttgtccgaagggagttttgttgctgctgctgttcaagcttgtgtgcctgtgactttgaattcaagaataatcttaagggcaaagggcaagcagccagcagagtactccagttgagaatgctaatggatggttgcattgcgcaactctgtcctaacgctccgagtgtgggtgagcctgagcaggcagagttgatggagctggaagggtggtgagccaatgagatgcctgggagttgcactatcgcctctgggcggcccctcctctgcatcagaaactttcacaatattctagagacttgaatagcaggttgaatgaaaattctctgtcccctggttgtcatagctttgtaatgataggagaaaagctgaaggatcagccgaaactgtgaaacagcctgccttgggcaagacaggaagtgtgcagctgcgccgtgggtcttccttctcaagcttccgttaaacagcgcagctgttcactaacactgaattactctttccacaagatgctagcctctgccattcagggtggtgttcctagccatagggtggctattgagtgcttgaaatatggctggcataattgagctctggacttttaatctaatttaattttaatgaacagagccacatgtggctaatagtaccagattgggcagtgccagtcgggaacatttcaccatcttgtttctgttggcccgcactctaggtaagcattgttgggaaaggaatcaagagcatccaagtcatttcattttctaactagggcaaagttgtggttgacttagaaaaaggataaatgtgcttatataaatacatgcacatagacacaggtatctgtgtcccttggtcctttgtttcttagcaccagattaacccaaaggttatttcttccttttcctatgaaagacatggacttcagtggagaaatgttttctaagtgtcgccagggaacatcagtatgttttctgcagccgttgttgctcagttcagcttccaaagtcgcctgctttgcgtagaagggagagatgccacatttctggtcctcagacctgagattctaggaggccagggaccaggcaggaagagcctctgcttctgtcaattctgtgtgagaataatatctcagcggtaagccagtgactcaatccaacgtgcgaggaggatttcattttcaaaacatttatttaaataaacttttatatgtatttgaattttacagaaaacaaaacactgacaaatactgtacagcttcgatcattcatatgagcgattcatttcttgaaaaagtgactggcttttctttacatcttcctgttctttttcctcttcccaagaaatcaaaaaaagtctattggacactggataaagacccctctgactgtttctgagtgtgactaaggcaggccagaagtccagtgtgggtggggacaaccccaatgcccaagtccatgccagttgagaaggtctcttctttatgcatcttcttttcaaattttcgaaaaagatttattttatgtgtatgagtggtttgcctgcatgtatacatgtgtaccacatgcatgtctggtacttgggtcttctacagaagcaacaagtgctcttaactgctgagccattcctccagccccctggggcctcttaggttcttcatgaacttactgtccccagatggatcaggtaggcacaagtcccaagcaccttaccctaggactgtatccgtggcaactctggaatagaccaagggaaacagtgtctgtagagtcataaaggaatgaattggcatgatgcaaggagaagcagtaatatgagaagaattgtcagggtgaggcagggcgacagggcaccaagcaatactttgggcttctgctctctggtgtctatgggagggcctatcacttcatgggccctgtatcatcctaagtgctctatcaaggctgtcggagagtctgcgacaggaagaggtgatccagtcacggttgggattccaggatatagaagcaactgggaactgcctttctggatggtttatgtcaggaactggctcaagtctatttggttagaaagcagtaggtacacttgtgtccagagtcaggggctttgttatggcaatcagggacaactgactgctgtcttaattcaaactggcagccagttgtcacggaaaccgtgtaatttgtatggtccctgattccggcgatccatccttgcagactgttatctgacatcccatttctgctgtgtcttcacctctacccccaagtcttctgtcttagggcaactgagagaagtgggaagagcatctggtgggtaccaattggcagagaaggggagaagactggtcattctgtgacatgcggaggacagccaggtaatccacaaccagctccctatgtgacaagggggcagagaatcaggaagtgttgctttggtcaaagaggcctgagggtggaaggcttgagtgcctagtggcattgaggtgatgtaggatgagcgggtgaaatgtgactgtctgctagaaggcccaggtagccaccattaggtagctaccctccaagggcctggagcacatcgggagtagacatgagtaccaggtggcccagctgaacgtagggtacaactttacattcatagagtctcatcaattttgggaattttttcttgctgctgtaatgtcataatttggctatgtcattaattagacagtgatttttctactgtctataatggtctccatggggacaatatttatagagctccccagtagatgtgcaaatgagccgttggagtataatcgcttccaagctgggaattctctgcttttgtaacatggccacaatacaatcaaaatgccaagcaatttgttttctttgactggggaggaaatgctctcttccactcagaaagtggcatggcttcaggtaccacagggcacatatgtcaatcaaccctggtctcaatgccttgcctcaccttctgtagcagttaatggcgtgtcttaaaagagtaggtcacccaggttgaattgtgaggtattacaagttatccttagcatcattgcatatccatccacagttatgagtacctactgtgtacaagacatttgcctgagcatcaacataaatagcaacagatacctttatagttttatctttcatttaaactatggcttctacctcccactggcaatacattatgcactgctaccaacacaggattgcttctggtatgtgttgtgttgtgtatgcgtgtgcatgtgcaagtgtatgtgtgcatgtgtgatggttatgagactggacttgggatgatcttacttggtttctttctggaagcccttggtcacacggattatagctagctcatgcgaggcatctctccttacgctttctatctctatattacatctcgtgggtacacacctgcaatccagtgaagtgaatatgtgggtttccatagctttctcatagtcactgccaagagctgttcatcactgcttagaaaagggcaccttgctgagtagttatggggtaatgtccccgagaggtcttgggccacattagacatctgttagaggtaatgaggaccttgtcgtgaattgcaagcaaagagctttgagtgtatctggagccatactttaaactttcaggtataggcaaaaggtcagaagcatatagaaaccactagctatgtctgtatcaatatatactgaagtggggactgtaccagggtcttagaatgtccaaatgtatttccagtaaaacattatgtaggaatagaacacacccatctccaacctgaatgatatacagacagtgcatagggccttgcaccatggcttcttaattgcacatatgtgcctaaatctggacatatcttctcataacacatttctgcaagtatatatatttgagcaaaaatatatattacatggctgcgtgataaatagaatatcctgtcccatgtacctgttgtccaaatgtgcatacatatgatacaaacagagttgaaagccatctaagatgcatatgtacatactttctgtgcttttgtgctggagtataccagaaactgctgtccatgcttggggcactgatacgggacacatagctgccaagacagagtaagaattgtctacacgccgcccccatccattgggatgcgtagtctgaaatttgtcccttggttgagtgatctgtgggagtgaatgcatcacgttaaaggctcctccaagtctctgtggttggaaggaggctcggctccaaggggaggacacgctgcccccttgctcactagacaagcagtgatggtctcttctccatctggaggagcttgggctgagcagagatccagaggtcttcatctttctttttcttcttctttttctttttcttcttgttctggtctggctgttggttgctcttaggtggccggctacagcagcaatggcaacagatgaagaagagggtgagaaccaccaccaggggcaaccccaggagcacagccaggcagactgtgttgaagacgcctctttcgtgtctgatccggatggtttcccagacagagttgaagaaagaactgtttctctccatggtgctggtctagtgtggggccagaggatcgtcaattatctaacaagccctcggtgtcacagaacacagtgttagacacttggaatttatttttctctcagcttcacgtttgggcatgccaccaggaacacctg

SEQ ID NO: 62 - DNA, 5727 bp, Mus musculus
atgctcgccttccccctgggatttctgcttgcttctgtgctcctggtggcttcggccccagccactccagagtctcccggctgcagcaacaaagagcaacaggtcactgttagccacacctacaagattgacgtgcccaagtctgctctggttcaaagaccgaccccacagtcactcagcgatgatgggacatcactcttggctcccggggaggatggagaggagcagaacattatcttcaggcacaacattcgtcttcagacaccgcagaagagctgtgacctggcagacagtgtccaggacctgctagcccggatgaaaaagctggaggaagagatggcagagctgaaggagcagtgcaataccaaccgctgctgccagggagctgctgatctgagccgtcactgcagtggccacgggaccttcttccctgagacctgcagctgccactgtgaccagggctgggagggcgcagactgtgatcagcccacctgtcctggggcttgcaacggccacgggcgctgtgtggatgggcagtgcgtgtgtgacgcgccctatgtgggggtcgactgcgcctacgccgcctgtccccaggactgcagtgggcatggcgtgtgcgtgcagggtgtctgccagtgccacgaggacttcacagcagaggactgcagcgagcagcgctgtcctggcgactgtagtggcaatggtttctgtgacactggcgagtgttactgtgagatgggctttactggccccgactgttcccaggtggtggctcctcagggcctgcagttgctcaagagcacggagaactctctgctggtgagttgggagccctccagtgaggtagactactacctgctcagctactaccccctggggaaggagcaagctacaaaacaggtccgggtacccaaggagcagcacacctatgacatcaccggcttgctgcctggaaccaagtacatagtcaccctgcgcaacgtgaagaaagacatttccagcagccctcagcatctacttgccaccacagatcttgctgtggtgggcacagcctgggtaaatgaagagactgagacatccctcgatgtggagtgggagaaccctctgactgaggtggactattacaagcttcggtatggccccttaacagggcaggaggtgacagaggtcactgtgcccaagagccgtgatcccaagagcagatatgacatcactggtctgcagcctggaacggaatataaaatcacagttgtgcccatccgaggtgatctggagggaaagccgattctcctgaatggcaggacagaaattgatggaccaaccaatgtggtcacaaatcaggtgacagaagacacagcatctgtttcctgggatccagtgagggctgacatagacaagtatgtggtgcgctatatcgcccccgatggggagaccaaggagaaggcagtaccaaaggaccagagcagcaccgttctcacaggcctgaagccaggagaggcctacaaagtctttgtgtgggctgagaggggcaaccaaggcagcaagaaagcagacaccaaggccctcacagaaattgacagtccagaaaacctggtgactgaccgggtgacagagaacagcctctctgtctcgtgggacccagtggaggctgacatcgacaggtatgtggtaagctacacttccgtggatggagagacgaagcaggttccagtgaagaaggaccagaggagcaccgtcctcaccggcctgagtcccggtgtggagtacaaagtttacgtgtgggcagagaaaggcgatcgggagagcaagaaggccaacaccaaggctcccacagacatcgacagccccaaaaacttggtaactgaccaggtgacagagaacactctcagtgtctcctgggaccctgttcaggccaacattgacaggtatatggtgagctacacctctgccgatggagagacaagagaggtcccagtgcctaaggagaagagcagtaccgtcctgactggcctgaggccaggtgtggagtacaaggtccatgtgtgggcccagaaggggacccaggagagcagaaaggccaacaccaaggcccccacagatattgatggccccaaaaacctggtgactgaccaggtgaccgagaccactcttagtgtctcctgggacccagtggaggctgacattgataggtacatggttcgctacacgtctcctgatggagagaccaaggaggtgcctgtgtcaaaggataagagcagcacagtcctgaggggcctgaggccaggtgtggagtacaaggtggatgtatgggcccagaagggggcccaggacagccggaaggccaacaccaaggcccccacaggtatgaacattgtagccggaggatgtgacatatttcatgatattgacagccctaaaaacctggtgactgagcaggtgacagagagcactgccaccgtgtcctgggacccagtagaggctgacatcgacaggtatgtggtgcgctacacttctgtcgatggcgagaccagggaatttctcgttgggaaggaccaaacaagcaccgtcctgacaggcatgagaccaggtgtggagtatcaggtcgacgtgtgggcccagaaggggacacaggaaagcaggaagaccagcaccaaagccccaacagatattgatggccccaaaaacctggtgactgaccaggtgaccgagaccactcttagtgtctcctgggacccagtggaggctgacattgataggtacatggttcgctacacgtctcctgatggagagaccaaggaggtgcctgtgtcaaaggataagagcagcacagtcctgaggggcctgaggccaggtgtggagtacaaggtggatgtatgggcccagaagggggcccaggacagccggaaggccaacaccaaggcccccacagatattgatagtcccaaaaacctggcgatcgaccaggtgacagagaccactctcagtgtctcctgggacccggtacaggctgacattgacaggtatgtggtgcgctacacctctgctgatggggaatccaaagaattcctgattgggaaggaacagaggagcacagtcctgacaggcctgaggccaggtgtggagtacaaggttgaagtgtgggcccagaaaggagcccgggagagcaagaaagccaacaccgaaggtcacacagacattgacagccccaaaaacctggtgaccaatcaggtgaccgaaaatacagccaccatctcctgggacccggtgcaggctgatattgacagatacatggtgcgctacacatctgctgatggagagaccagggagattccagtgaggaaggagaagagcagcactgtcctcacaggcctgagaccgggtgtggagtacacggtccaagtgtgggctcagaagggggcccgggagagcaagaaggccaaaaccaaggcccccacagaaattgacagccccaagaacttggtgaccaaccgagtgacagaaaatacagccaccatctcctgggacccagtgcgagccaacattgacaggtacatggttcgctacacctctgcggatggagagactaaggagattccagtgtcaaaggatcagagtagcaccatcctgacaggcctgaaaccaggcatggaatataccattcatgtgtgggcccagaagggggcccgggagagcaagaaggctgataccaaggccctaacagaaattgaccctcccagaaatctccgtccgttcggggtaacacattctggtggggttttgacctggttgcccccatctgctcaaattgatggctacattttgacctaccagttcccaaatggcaccgtgaaggaggtggagctcccaagaggccagcagagatttgaattgcaagacctggaacagggtgtcacctatcctgtttccttggttgccttcaaaggtaatcagcggagccggactgtgtctaccaccctttctacagtggatgctcgctttccacacccctcagactgcagtcaagttcagcagaacaccaacgctgccagtgggctctacaccatctacctcaatggtgatgccagccggcccatgcaggtgtactgcgacatggacactgacggaggcggctggattgtcttccagagacggaacactgggcagctggatttcttcaagcgttggcggagttatgtagaaggttttggggaccccatgaaggagttctggcttggtatgatctcagagaatcaggaaggacttgataaactacataatctcaccactggcaccaccactcggtatgaggtgagggcagacttacagactttcaatgaatctgcctacgctgtatatgatttcttccaagtggcatccagcaaagagcggtacaagctgtcggttgggaaatacagaggcacagccggggatgctctcacctaccacaatggatggaagttcacgacttttgacagagacaatgatattgccctcagcaactgtgcactgacgcatcatggtggctggtggtataagaactgccatttggccaacccgaatggcaaatatggggagaccaagcacagcgagggggtgaactgggagccatggaagggacatgagttctccattccttatgtggagctgaaaatccgcccgtttggttacagcagagaccgtttctctggcagaaagaagcgctccataggaaaagcaaggatgttctgaaggcttgtctgagctgtcttcacaggagacaagagaaacttggggttggcggggtagatggtgcctaggaagctgaagtttgagggatgctcatagcctccgacttcctagattgctgggtacacagtgctaatgacgtcatcacactttgacctttagaggttccttccatgtcatctgcaagtttgcctgtctctactgagggcttcattgttggctttcaggagccaacaatgttgtaactgaacagtacatatggatagaacacgtgttggaatcacaaggtttttcagcccatccttaatgacagatgtattgaattagggcaaaaaggtgaaccatcctgtagaccatcaattggaaatctttagaaattggtggatatctctgtatccatctgataatatagatctttgtagaaaaaaaaaagacaaagtgaggttctgatcccctgggtgtcagagctgaggcgacctgctacttcttgtctctcctggacctcctggtgtttgaaggaaatgtttatatcttactacttttaaacttcctgtgtgatgaagaatgaagagactacaaaggggccacgatgcagtcatagttaagttctgactagtctctagcattctagagaccaaagctcccattttattgctatttttaactgccccttttccagacatttgcataagttctttcatagatctgcatatgttgtaaataaatttgcagtcatttaaactttaaataacccatctctctaaataactggtcccctcagctccccccgcccccacttcactcacctccatgcctctcccctctcccgggtccatcagccctcagcctccctccttccctgctccccgcactggaagcttcctcacatcatctttcttgcgtgtttggtgtcattttggaaagttttctgtaaccaagtcagtgacctttgaagtaacttaaattcctactcaagaaaacacaaataaactgtttgatttt

SEQ ID NO: 63 - protein, 1573 aa, Mus musculus
MLAFPLGFLLASVLLVASAPATPESPGCSNKEQQVTVSHTYKIDVPKSALVQRPTPQSLSDDGTSLLAPGEDGEEQNIIFRHNIRLQTPQKSCDLADSVQDLLARMKKLEEEMAELKEQCNTNRCCQGAADLSRHCSGHGTFFPETCSCHCDQGWEGADCDQPTCPGACNGHGRCVDGQCVCDAPYVGVDCAYAACPQDCSGHGVCVQGVCQCHEDFTAEDCSEQRCPGDCSGNGFCDTGECYCEMGFTGPDCSQVVAPQGLQLLKSTENSLLVSWEPSSEVDYYLLSYYPLGKEQATKQVRVPKEQHTYDITGLLPGTKYIVTLRNVKKDISSSPQHLLATTDLAVVGTAWVNEETETSLDVEWENPLTEVDYYKLRYGPLTGQEVTEVTVPKSRDPKSRYDITGLQPGTEYKITVVPIRGDLEGKPILLNGRTEIDGPTNVVTNQVTEDTASVSWDPVRADIDKYVVRYIAPDGETKEKAVPKDQSSTVLTGLKPGEAYKVFVWAERGNQGSKKADTKALTEIDSPENLVTDRVTENSLSVSWDPVEADIDRYVVSYTSVDGETKQVPVKKDQRSTVLTGLSPGVEYKVYVWAEKGDRESKKANTKAPTDIDSPKNLVTDQVTENTLSVSWDPVQANIDRYMVSYTSADGETREVPVPKEKSSTVLTGLRPGVEYKVHVWAQKGTQESRKANTKAPTDIDGPKNLVTDQVTETTLSVSWDPVEADIDRYMVRYTSPDGETKEVPVSKDKSSTVLRGLRPGVEYKVDVWAQKGAQDSRKANTKAPTGMNIVAGGCDIFHDIDSPKNLVTEQVTESTATVSWDPVEADIDRYVVRYTSVDGETREFLVGKDQTSTVLTGMRPGVEYQVDVWAQKGTQESRKTSTKAPTDIDGPKNLVTDQVTETTLSVSWDPVEADIDRYMVRYTSPDGETKEVPVSKDKSSTVLRGLRPGVEYKVDVWAQKGAQDSRKANTKAPTDIDSPKNLAIDQVTETTLSVSWDPVQADIDRYVVRYTSADGESKEFLIGKEQRSTVLTGLRPGVEYKVEVWAQKGARESKKANTEGHTDIDSPKNLVTNQVTENTATISWDPVQADIDRYMVRYTSADGETREIPVRKEKSSTVLTGLRPGVEYTVQVWAQKGARESKKAKTKAPTEIDSPKNLVTNRVTENTATISWDPVRANIDRYMVRYTSADGETKEIPVSKDQSSTILTGLKPGMEYTIHVWAQKGARESKKADTKALTEIDPPRNLRPFGVTHSGGVLTWLPPSAQIDGYILTYQFPNGTVKEVELPRGQQRFELQDLEQGVTYPVSLVAFKGNQRSRTVSTTLSTVDARFPHPSDCSQVQQNTNAASGTIYLNGDASRPMQVYCDMDTDGGGWIVFQRRNTGQLDFFKRWRSYVEGFGDPMKEFWLGMISENQEGLDKLHNLTTGTTTRYEVRADLQTFNESAYAVYDFFQVASSKERYKLSVGKYRGTAGDALTYHNGWKFTTFDRDNDIALSNCALTHHGGWWYKNCHLANPNGKYGETKHSEGVNWEPWKGHEFSIPYVELKIRPFGYSRDRFSGRKKRSIGKARMF

SEQ ID NO: 64 - DNA, 90614 bp, Homo sapiens
gagggtctctgctcatttctttctgtgctaaaggctttttcccattttaaaagcagtaggcaggaagtcccagaatgcctgaaacaggaaaaagagaaagaaactttataaatgcacttttgaaccccgagacccagctcctggccaggagacaggcaaactcttttaatatccttattctggattcacttaaatggaaacagcctccagtatttttagctgctgtgtaatcaaagtgaaaaagaagaaggaaatgtatatatttttctttcctagttagaataagagaaggaattgctcattatcttttagcagagtccctgctaggaagggaggaaaacaccaggagtctccatttgctcctcctctggcctagacaggatttaaacccaggaagggaagccaaggagagacgagaaccagggacgaccagcaagtaccaaggtctgcggcaggaggagaccggctcacaggagcagcagcattggaagaggcacccagcagcctcccaggtaagagtgccagttgcccaagctttacttactggagggagggaggtggccaatgcagatgagctcaaaagtggtggctcaggtgcctccgttcccgagcctgaaaatccgggcagtgtaattagtctcctatcacctccatgaagagttaaaatgaattgggaagtacctctcaggacccgtgtactgcatccttagtattatactccagtctcagacagggctaagcatagttatcctctttcctgcaacacagatgcgtctgtgttgtatcagcttctacctggcgtaacacatttttgtataaaatgtttcctttaagatgttccttctcatttttttttctttttaacttacttacaatgtcaaagctttctctctctctgtctttttttggataatttagtattgttgtatttcattattcttttaaatcctaaaacagaattgttattttagttatgattaggaagctatgataactttccctttgtctggattttgtgtgaatcagttaaggggatgtttgcaaacacatttgaacagctttgaagtatctccagacatttaattttacaggttttaattattatttgttaagacgacaacttctctcgaaatccccatactattaccctcacaatacctcaaagaaaacatttcaagacatctaaaaaaatgatgtggttggccgggcatggtggctcatgcctgtaatcccagcactttgagaggctgaggcaggtggatcacctgaggtcgagagttcgagaccagcctgaccaacatggagaaactccgtctctactaaaaatacaaaaaattagccgggcgtggtggcgcatgcctataatcccagctacttgggaggctgaggcaggagaattgcttgaacctgggaggtggaggttgcggtgagccgagattgaaccattgcactccagcctgggcaacaagagcaaaactccatctaaaaaacaaaaacaaaacaaagcaaacaaacaaaaaaaactagtttttggaggtcttactttttacttatttattaatttttgtgcttgggagagatctgggggaaggatggagaaagaatgaatgagaacaggcagggcttcacttaaaagcatgaaacctgtgttgcttatataagcattaaaaaaaagaacaagttccaacataaaagtaacaaactgcccacattgggacacaggttagccacagtgcctaaaatccactggttcttggaaaagctgaggtgtcaccaaggcatcagatgataccttgctcggtcagggctacgtattggcagctggcctcttgacattcagacatttgttgcagactcagaatcaaggtgacagtgtcagacacaggaaaaaatagagtatcaatactggtatcatttttccaggagagaagggaagaaggcacctggcattctttcatacaactctaagtactgctttgtccccagtttataggctgcagctgactcccgaaggagggaaaatagaacaaatgatttcaaatcatcccgtggcttctggttttccagtccagtgctgctctgtggtttgaaatgtagggtgggcagagctctctttctgagaagatgcctgaggaaattgtgcccaggcccagtggaaacttttgtccattcactgctcattccagagccttggctcctataggatctggatacagacatgagatcatggtttaggtcctgtagccacatctggagccaccagtctgtgagcagaggttgctaagatctcaggcctgatctctggatggacagggactttgctgcttctgccacagtggactcactgctaatgctgcccagccaccatttgaatctgtacccagcgagtgtgagtggaacagtgcaaatgcttggaaattagcaaacgctctcctccttgctagaagactggaactttaaagttacttcaatatgtggaaaacaacacgttagctaaagaaagaaattgcagagttttttgttttgttttgttttaatctgacgcccctcacacccatggatattagggctaattgtatacaaagtaatatttagtcattctggggactggctgtttggttgaataagggagaggaaggttcctgaatttaggtcccgtgtctattttatcttgttattgtgcatgagcttggtcccacaaaagctaaaggaagttcttgctgtgagaaagtgattcattctctgggggtaaatgaacatctttgcctgatgtccaagaggagattttaaagtgctttgcacagagcctggcatgtaataaatgcatagaaaatggtagctaccattatcatcactcatttgagcctttgcaaggcagattaagagtcagttgtcaaaacaaaacaaaatgagcctgtggtcacccctgaaaaagtgattgagtgctgaggctgggtcaggacaccatccttgatcttttcaagcctcaggcgggtgggcagacttgatgggatggctctccaggaaaagggttctagcacggtggtgtgagagtcatctccaaggacttcctggacactccctgggtatcccacagaactaggagaatggggggacagagtgatacccagaatgtgaccatactaagccctatcacataaaaccaaatttccattctcttccatacttagctgtcttgtatcctatatgcaatcctatattcaacatcacagagactagaaataaaaatgtttgtatgtacttgcttctactggagtttaacctaggagagacagacctcccttgtatatccattttcttggatctgaaggagaaagagatacagaggtgaaatcggtcccctaagcctctagttcaaggtgagttgagccagggtagattcctcagccagctgagaacttgctgtcctggaccaggttacttgggaagtacagggaaggcccctgagtcacccagggcccaagctgcagatcattagcaatatatgccaaagagagttaaggaaggagtgacaagtttgccagtgacatttgtgacattgatgcatccctagccactcatctccctcattttccttcatagtttaatgatatccaccctgtcatttggggacagaatatcttcttaagtgactctgttggaaatccatgatgatacactttttctaaaacccaaagcagtgctttcattttcctgtggttaactgtcaaggcaggatgagataataagggaaccagagaaagccctgaatttaagtataaaggtctgtaacagtggctagaaattggctacctctcttctttggcgtaagtagtattttttttttcctgacccagggtgtgtgtccttctttggggaaaatgaggtgacacagaaaccatccacccctggggtccaagaggaccatcaggattcaggggccatcctcctcccttggccaaggcttggatgccatctgcccctgcagacagaagtatctgtgcactttggtgtttcctaggaagggaattctccagcttctcatgagaattgactgggacttaacctctatgtgagggaaatgcaattcatgtccccagtggatcatccttggcaccactcagaggaagtaaccctctcttaaaaacacatggcagaacggaggacatctggtgttttttttgtttttgtttttgttttgtatatacaggacatataacagacagatgaagaacacagacgcaggcagtggacagacctggtgtgtgatcccagctctgctgctttttagctgtgtgtcctttggcaaattacttaacttctctgaggacctgtcacaaagaatgatatcaactgactcccaggactttgaggattaaatgaggataatttttatagcgtttggcacaatgtccattatctaataagcacacatacacagacacacacaaatccagtggctattactacttacttcacaaaatattactttggcaggactgtgctatgaggctggtgatacagaggggatcaacacagtcatggccctctctgtcatctctgagctcacaaggatacctgggctagaaacacgcatacagatttggcaactgtcaacatttggctggaaattaaagccacaggggtagatgcagataccaagagagaacacagcagaagcatagagccctgcaacatctgaaggcagaagtagggggaccatccatgcagcccatggtcagtcgtgtactcctcaaagagcctttctggtaaaagcaacacaaggcagcatttgttcctgagtctaatgtatccctccctcccaccttcccacaccacccaacaccccttctgcagtcagaattaaagacatgaccagcctctgtaagacaatgattcttggggacaactggtttcctgtggttcctgcatacacatttcctgcatgtaaatgcccttcgcttcatgcatccctgcagaatttacccaactttccatgggaaaatacccctcagcagaataatcctccctatttggaaatgtatcatcctgcgttttgctcagaaaaatcttctgccctgtctgccccctccccaccctcgcggagctcagcctgtggtttgctgtgcatactgaaagagtcgatgaagtcatccttcccttctgctgttaaacaaggagtctctttcctgccacgtgttggagtgagagccagcaggcttctcttcttgctcattacacttgacagaatgttaggttgaggatttcccttgctctcatcttctttcgaacaatcaacctacccaggaaaatctgagcgcaacttgtggaatctgagaggcagtaattaatgaggacatcttgttacaaatcagaaggacaggcaacaccaagggctccaacagggacttgtgggagttctcatattccaggctacaaaaacaaatgctgtagacctgggctctgggcagccttactgtggttgatggcaagagtccacggcttttttttttttttttttttttttgctttcgttgagaacttcttcagaaaaccatctgcacttcatttatgtctcaggctgggggtggggggtcggatggaaagcacgggcagagaagtctgctttttcagccctatttttgcccaggaagaagatttttggacagtggaaactcatgtgctgccatgaacacagtaggtgctttagagatcaatatgcgttgttactggtgaacggcagaagtgtatagggattagtggctccattgctggacactgtgcatctgggattgcatctgtggccgtgtgctcatcaattgcataatcagttgctcaatgccactgagcctcagttcctatcctggggatcaagtggagaatagcgtgtggcttttatctttgtgatgaacgtctaaggatggccgttgtgaaatatcattatttttatcctacacctgccttccaactcattttcctggcttcccactccccccatcttctgacaaaaatctcaagcagattccagagcttttctggtggcttttggtcttagaagagaattgcttttgtgaaagcaagtccatttcagtattgagcctcagtctctcatccaggccacatcttttcttctttctcagctcagacctgatgctggaacctgcagagaagctggagggaaggggcttggggctttcctccctccacttctctctccttaacatgcatggctgcttctggcttcaccagtttgctgctgcctggggcgaggtgagggttagaaaagaagggagagggcacttttactttactggggctgttgtggttccctctgttggatgcccttgttatggtgaatgcttccagtgctgggccacccctcctttgtggggagcttctgtgggatctttagatattccccttcccacccactgggcatgtcctgctgcagtcgcccccttggggtggcacactcctgctgaacggtggacctgcacctcagctcgggccctgaactgccctcttggtagctctaacatgcctcatttctgtgacatcaacttggcctcgccaaagtctgagtttcagtcctctcacactgcagcccccttcctctctctgccatgcagcctgttccagccaagcttccacctgtgaattcctccgggccagaatcaggcaccagtctctttgcctgccacccccactaattcaccgtgaccccacccccaacccccaaacctccagtggcacactgtctttgaaatgtgtgggcacggccaggtgtagtggctcatggctgtaatcctagcactttggggagctgaggtggacaggctgcttgaacccgggaattcgagaccaggttgggcaagatggtgaaaccccatctccacaaaaaaaatacaaaaattagccaggcactgtgacatatacctgtagtcccggctactcaggaggctgaggtgggaggatcactggagcccaggaggtggacattgcagtgagccgtgattgtgccaatgcactccagcctgggcgacagaatgggatcctgtctgaaaaaaaaaaaaaaagaagtgtgcaggcacttattacccatggtccaagtcacaagacaacaagaagtgtcccattgactattccattccatctgccgggtgttgagtccagtgcctgaaatgcagtcagttctcagaagaagtgagcttttattattatcaacaatacatgcttttggtgataggaagagccatgaaggagtgggagggcaaaggggtaacacaaagaaaaacccttcataggtaccattctgcttaattcacagtggtgtcacatcccttgggtacaacatgtataatggatgaaagcattgcatagggacatgtatctaactgcgctcatttgtcatttgtatcagaatgtcatattggcacagagcaagcataggcttgcaatcagatgggtctgcgtttgaatcctggctctgccacttcgttgttgggcaaccctggcaaatgactttacctctcagatctggtttccttaccttttgagtgaggagaggaacactgaccttacatggcagctctggggattaattacgaggaataatgcacccagccaatgcctagtgcgtagcagcaactcagtaaataacatttagcatttcatgctattgtgattcttcttcttcttttattcttccagggctcttcaccccctgtttcctcaacttcctgatactaaatgaatgatgactattaaaattaaacattttacatattactagaatttggcttagtggctagaaatatttcttccttttataatcaatatagttgaaagatgcctttcaacctaggcgttattattattatttgagatcgagtcttgctctgtcgcccaggctggagtgcagtggcatggtctcggctcactgcagcctccgcctcccgggttccagcagttctctatctcagcctcccaagaagctgggattagaggagtgcaccgccacacctggctaatttttgtgcttttagtagagaaaggtttcaccatgttggccagactggtctcgaactcctggcctcaagtgatcctcctgccatggcctcccaaagtgttgggattacagatgtgagccaccgtgcccggccagcattattctttatagcagaacagatgaggaagaaaaggaagtcacattcagtaaatcgattgaaaataaaataaacctcaaaattttgactaatccttgctcacataccagacatagtgctcactgctgttcacatctaagaggggtgacgcgctgtcattcccacgttacagacaaggaggcggaggctcaggatgaggagcatttttagggatgcacatcctacagcctgtctgaggtgcctttccaccatatcccaactgcctctcaccacgggcagggagagcctgtgctcaagcaaaacacagaccacaggagaggactgtgtttcctgacttcaaattttggcataaataattgcaggtcttgggttagttacagaaacccattgtcaagagacagctctgcagatcactttctagataactgctgctatgcaagcccaactgggatgtatcttgtgactgaggttcctgtgagcaaaatgtgaggtgaaagctgggtctcttgtggtctgtcctgcctcagcttgttagtgtgcaaagaatgggccgtcctagatgggggttgggggcacaaggggaaatggctggagagagtaattctgctcattgacagtggtgaagacaccacctcctggtgaaggaggaggaaaaacctaaccacctgccccatctcaggtcgcctggcttgactgacaaaccaggccacccatgcacggatggatttgagaaacagtgaccaaacctctccgcatgtgtgacagtgctcctgccacaggagggccccaagatgaatcagcccagtcctgtccttaacaggctcacggcctaagacaagctgcatacaagagtaactgtaacaccaggtcaacgctcaagagaccagcagtgagggacaggtccatttctctgaatgcttagcagaagtgaagctagtctccagctgggtaaggcagggggacaggagagaagactttgtggagcaggtaattttattagaaattcttatgttttactggttcacaagtgagtgtcgtgagcaggatgctggccctgcagtcagtggacttgggtctgagtacaggttctgctcttcctggccgtgggactcaggacaacttgctcagctttctcatctgtgcaaagcagcatggcattgtggggatcagcatggactctggggtcagattgcctgggttcaaatcctgccactctgagctgggtgctggttggcaagtcatttaaagtagtagtgcttcagtttccatatctataagatgggggtcatcatagtatattccaacaaacaattgtgagaatggaatgagttaataaatgtgaaacacttagaacatttagaatagtgcctgtcacatagcaagtgctctatgtgcagctcatattgttgatgttgttaaaagggaggataatattagcgttgctgtaaagatccagaattagggggatcaaagcgtggcacacaataggctgtcaacacaagagagctgctcttcttattattaataagtgcaggtgagcctagaatgagaggtgaagagaagggcatcctgggcagtgtgaacagtaagcaaagagaggaggcaggaatatgcaatctgtgaggcaggaacagaaagtaatttggttcggatccttgggagaaatagaatgagttctttctgctggtttcccagcttccttgggctcttagaatctggtaaaaaaaaagccagcttccctcagcacatctccgtggctttcttttgcaatgtttctgaatacaggcatcctggagggtctgctccctgtctttccaaggatgagtctccaggagatgttccgcttccctatggggctcctgcttggctctgtgctcctggtggcttcggccccagccactctggagcctcccggctgcagcaacaaggagcaacaggtcactgtcagccacacctacaagatcgatgtgcccaagtctgccttggttcaggttgacgctgaccctcagcccctcagtgacgatggggcttcgctcttggccctgggggaggccagggaggaacagaacatcatcttcaggcacaacatccgccttcagacgccacagaaggactgcgagttggcaggcagtgtccaggacctcctggcccgggtgaagaagctggaggaagagatggtggagatgaaggaacagtgtagtgcccagcgctgctgccagggagtcactggtgagctcaccacctggtattcattcaacaaacatttgatgagcacctattatgtgccagggtttccactagcctcatgagcactttgtgactctggtgtgctcctacttctcattctgggttttctctagggggcccatccctgctatttattcatttattcactggtactagctccagggggcatctggaagctgagcagggagggaccagcagctcttgcagagagtctagactcctggcctattgcttccagatgggaatgcttccaggagccgtcatacctgtgaatcaaagcgctactcagagaggaagcaatgggatacacaggaaagatagggccttggagctagacaagacaggttacaaatcccagttctaccactttttagctgtgtgactttgggtaaatcccttatgtttcctcaactgtccaacagggatgattctatcagctagtatagttctgagaactagagatgatgtgtagaagattcctggcccttagaggaatttacaaatcagtaaattataattattttattagtaaaaattacaattataattgtaaaataattacaatttaattttacaaataatgaaggttctcccccaacgcaaccccgtcacttttaaacataaactgcccaggctgatccaatgataatgaacagtactttggcataggatttcatgcctgaaggaattgctatggtaaagagcaccttaaccatcagatccagatacagaactcggcaccagggacactgccatgaataaccagcatggacttgcttctgaggagctcccactttggaagcgtttttaggaaggaaagaaggtgttctgaaaagcagaagctgggccacagaggagactgcactaaccagtctgccctccagctgcctcttgctgtgtagggtcagagaggggagcctggttaaatcccttctccactgtacccatagttgagagtaggctattttgtagcttctgcagttccgttttttccagacttcaatctgggctcatttcacaaggtcccagccttgctagttccagcaaactccaacctccctggatctcactttccccccaggagtcctgccctgcagtgtcagctggccagggtggagcatttaaggcccctccataggaaggcactaaataatgaccaccaggtagagaggaaggaaccggggaattcacacgggaagggaaaggaaagaagggtgggtcctgcagccttttcaggcagagaaagaaggagacgtttgcagatgtcacagattagaaagcctggcccaggctggaaagggccaacaccttttctcccttgtggagctccaccatcctccaaaaaatagccgtgcaagacccagaaatcaccagacccttaagagtggggctaatgatttctgggtcttgcatggctgatctcagaggaaggagatccccacgcacaacccttcaacccaacctactgtttctcctctccctcccagatctaagccgccactgcagcggccacgggaccttctccctggagacctgcagctgccactgcgaagagggcagggagggccccgcctgcgagcggctggcctgccccggggcgtgcagcggccacgggcgttgcgtggacgggcgctgcctgtgccatgagccctacgtgggtgccgactgcggctacccggcctgccctgagaactgcagcggacacggcgagtgcgtgcgcggcgtgtgccagtgccacgaagacttcatgtcggaggactgcagcgagaagcgctgtcccggcgactgcagcggccacggcttctgtgacacgggcgagtgctactgcgaggagggcttcacaggcctggactgtgcccagggtgagagcggagatgtgccctcgggccgccggactcttctttccaatgcaccatttaaccctcaattacacgttgtcatctttgggggtctcttcctttagcctacgccagattgctgagtcccaaccccagagtttctgattctgcgatggggcctaagaatttgcatttctaacaagttcccaggtgatgctgatgctgctggttagaggccctaaccttgaggaccactggtcttgtgatctaatggctgtgtgtgagtgtgtgtgtgtgtgtgtggtgagggggtcagtattaattacctgtcgttcggataataacttctaggggtcgggaatggcgccttacacaggtctgcatcctgcacacccacccttatagtgctcagggaatactcactgggtctggatcgcctcccttgctcaccctctctgccctgttcctgttctgcctgcagtggtcaccccacagggcctgcagctgctcaagaacacggaggattctctgctggtgagctgggagccctccagccaggtggatcactacctcctcagctactaccccctggggaaggagctctctgggaagcagatccaagtgcccaaggagcagcacagctatgagattcttggtttgctgcctggaaccaagtacatagtcaccctgcgtaacgtcaagaatgaagtttctagcagcccacagcatctacttgccaccacaggtgaggaagccacctgatgccccagggttcccaggagaggccccattctaaatggtttctttcattaaacacctgtaggcagttgccttgattaggggtttgaaaaacacacctgccacaatcctaggttctgaagagtcccagttctctctcttctttccttgctccctgattactgggttctccaagcccatgaagacctgctagatgggggctcatggggtcttctctgtccctgagattatttgggtctgcaccttctcataagcagtcaaagtgtagacatgaatccccagtctcttactgaacccccaaagccattcagaaagttcagataggtatgggtgagaggctgctgaagccacctgtatcagttagattcatcttggtgggaaagacaggacacaaatggggtaaatgaaatttcaaagtttaactaacagattgttcacaaaggtgtgggtaggggttggatggtgacacactaagacctgcatcaataaggatactctcctgcctgaaggggcaagggatagatgttggtacttggacccagagagagctgtagaaaagagctgcctggtagggttgttttggtagagggatgcaggcagtccaccgtgtctccaaagaattctgtctcctgccctctgatctgctggtgattcctgctagctgaacctggaagccaaagggtcaggtaaacaggcagactcaattcacagagatcacagcctggggtacagaacaagatggaggatggtggaggcttgatctggagaaacagaatctcctgtgcaccagcaaatgccaccaaaatgtttagaaggattagcatcactgcttactctttaaacattcttgtctcctcgtgaacattcttaaagcagcttagatcttcaaggatttggagaaacgtagttggttgaatgactaactcattccttcacacagtacatttttattgagcacttaccatttgtcaggcactgttctcggtgctaaaaatgcactgcctccatcctgccctaaacttctagggaaagatctaggaagatacagatggatggaactttggcatgcagttgtctttgcagagacatcaagctgcctgtcctttatggtggtgggactagggtggaggtggggatgggtcagtgttggaaagggctgtgagagacttggccatcatgaggtcaccatatgtgattacctttgtcagtgccctcaagctaaagacccccaggagcacccctgtagttgaacaacttgggtgtcttgattgttctagcatgggtgactgcacactatgggggaccatagaggtatctcagtaagacagcgttagaaaggactggttagagaatctgggcctgtgttaggtaatttgggggaaggtgtaaggaagcagggattgggtgctgtcaagaagtggggagagcctctcccctctgagaggctgaagttggtgattgtaacagaagtggccatcactcatagtagtcaggagagtgggtgttcagctatttgtgtggtttggacaatggtcatgtttttgtctgtgttcagagttgatcatggaagtgtcttgtttttgtcttgatctatgcggtcacagagtgacctgacattgatgtcctgtgaaatggtttatgttcaataggagacaccaagtcctcactgtgggagccaggcccattctggctggcagagtctgcttttctctttttccccattttgtctgtggctgcctctggtacagctagcactgtgtccaaagcctcccagtgcagcacagagatgcctattctgaaagtcctagcaacccctcatccatcttgctctcgggatttgtaaaattctgcaagtgtgaagtttctctttctttctaatctgattcaggttaaacacattcttatttgctcctcaggggagcctaagacaagaggtactcatccccaccataatcgtgaacattctcattaagtccttgctttttcatttgtgattccctcccaattcttttacaccatgtaggaactcttatataagcctcaagtcacatttattactcacctcttgacctggccttcagggaattccatctttaatgggagtctaaaaacagcacctggcagatggaagccagtgggtgagaggaaaagcttcagagaaaaggctctgtgaggctctttatccataactgattgaatcggggacgttcagagcccagggaccttgagatcactgagttcacacctggcctgacactaattctcgatccttcatcatccgtcagtggtcagtaggcctgggtggagacacctccagggaggtgaaggtgggggcgtgactgatgaagaggggaagcctgagaattggagggccttggctttcctgtcaaaaacttagaaggccaggctccctcagcctgggatatggctgttggaatttgaagtgcttctcaaagaccctagtcctcccatccctagaaaagttctccccttagagctgtagcaatgatccattcctttgtattaatcactgtaacttcatgtttttttttttttctgagtagaagagtaaacatttagccgttaatactttactatgaataaatgtatacaataactctcttccttcacaggacagacagattgggcagcatgagaataccaggtaccagatggaagtgctaaaattggtaaaaatagcaggaagtacactcagatggaccaagttaaaattcacctactttatagttttgcctagggttcatccttagaggagaatttgagaggcaagggctgcaatttgggagatggagaaaggagcttgttggattaccaatgttgtccttgagaaagtttgaaatagattctctccactttccgtggaagtgcctgagctgcttatcctgaggtcgtcttagagggcaggggctctgcagctgaagagtgggcctttagttcagggctgtagctgtcagagctctggactgagtggtttgggtggccaacctgagaggtacagtttgggcttggccaaagtcagtgtggacagggaagaccacatggcctctgatgggatggggaagtggaggctttcccaaaagacagtctgcccatggaatatgtgaaaaccagcagcttagttgctactttggtagctcaaagacacctgctaagaactgtgtcctggggctgaagccagctcttgagatgtcaagaaagggagctgacctgataaccaacagcctgtcacagaaccttggaacctctgctcttcaccactttctcttgcctccgtcacccctgccctagaccttgctgtgcttggcactgcctgggtgacagatgagactgagaactcccttgacgtggagtgggaaaacccctcaactgaggtggactactacaagctgcgatatggccccatgacaggacaggaggtagctgaggtcactgtgcccaagagcagtgaccccaagagccgatatgacatcactggtaagagccatcactggaatgtgagatgtatgctgtggatgcagaggtggggatagtgtgtgcagagggcactggcatctgcactgctcaagtgtgcacagacagcccaggggccttaggaatcacacttgaatctgacccttgaatctgccagacataagcccacctgggaggcctgtagactctgccccagcattccagagctcgatcccagggcaccttgttaacagattatatttgtgagatgttctccaagtcagcaaactctcttgaagaccctgtctgtgtctcagaatggatttgatggtgtatagatattccttttggaggaactttagtatttgggtgttggggacaggagggaacagaaagagagagagagagattgagattggtttgttgagcatgatgcatggaaggggttgtgttgggggatgtggaggggggcagggtgcagtgagcaggggtggctctctgtctctgatttctgagctaatgctgccaagagctagagctcaaatggctgctaaggaaacaaggctgcagggatggatcaagtttggcagtgcttgaagtctgtacaattccagggctcttttttaagaaaagtaatacgcaatcatgaatacccaatcaggtacaaggccttggaatgggcccgtgaaagtgtggggcttattagcttcatggtaaattccctcctggagccttgttctgctgtccactccttgagttctgtcttgacaggacattttggggttcttagtgtttgtggagtgcagaatgagggtgtgtgcctcacacaagcttctgtttgtctgcattttaccaccacagtctgaatatttgtgcccaaggaaaaataattctagttgcttctacagagaaataacttttttttaaaaaaagggctgggcataatggctcatgcctgtggtcccagctacttaagaggctgaggcgggaggatcccttgagcccaggaggttgaggctaccatgagccgtgattgcaccactgcactctagcctgagtgacacagtgagatcctgtctctaataaaataaataggaaaaaattaggctaaatgtcacaatgagaaggagagatgctttggaaggaaaagggttgctgggagcagaaacacatttgggtctataaataaaattgggaaataagtgctaggtggcccagtgaagaaccagagaacatttgaaatgcatttcaattgctgtcatctcatttgctgtgatgccctactcccatccccagcctataagccccctcagtgacacctcatgttctattgcacctgcggggctttatttgcctgcaaatacagattcatctttggaggaggaagcatcacctctcatcttccctcacgggagaaatcccagggaggagtagtgctggggagaggggtctggagcctgcactcacatcctgcgctgcctgcttgtttccaggtctgcacccggggactgagtataagatcacggtggtgcccatgagaggagagctggagggcaagccgatcctcctgaatggcaggacaggtgagagctacttggaggcactatgggcatttaatcatgtttgcattctcatatttttcttggctgactcctctctggataagaattctgggatttgcagacagacggggtggctcacgcctgtaatcccagcactttgggaggccaaggcaggcggatcacctgatgtcgggagttcgagaccagcctgaccaacatggagaaaccctgtctctactaaaaatacaaaataagctgggcgtggtggcgcatgcctgtaatcccagctactcgggagactgaggcaagagaattgcttgagcccgggaggtggaggttgtggtgagccgagatcgtgccattgcactccagcctgggcaacaagagtgaaactccatctcaaaaaaaaaaaaaaaaaaaagagaattctgggatttacatgtagagagagtctatccctttatgtactgatgtctatttttgggcagggaaagggaagcaaacttttcctatttcaaatttttcttgccattgaaaatctctcccagggtcttggagtcaagggacaagactgtctgacaccgttctgcttattttaatagcttctatcaccgcgttgtttttaaggcatttattatctaggacataggcacatagctccttattccctaaagacaagtgatctataattttcttcttgccacacctgtgttttttcctgatgcccacattcagtagactcctctaaaatgtcaaaagatattaaaaaccctcacatgggagtagtggtatgttgtcatctgtgtattgagaaaatatataatgataaaaggttacaaatcagtcatatttgacaataagtttgtaatttattaatcagaacagaattggaaaacatggtaggcatacatacgagacatcctaggtaacttttagtttttaaaccatgcttgagcccatattgaattgtgaacttcctcattaactctgtgctcctgccttccccatgctggaaacctgtgatctagaacatagtgccactcggggagactaatccttggagctggtaaagaaggagtctttgagttttgagtcttcgttgaaaagttttttagttctttccaattcagtcctggaaatagctggttatggtggtgagaataagaggtgagatgttgtgagaattgaattcactatttcagctgcctaacagattgcttatctgcagtatgaaacagttatagttgggcatttataatggagaacatataacttaatttacaaactagacaaggtagactgtacagtctgcctgaatagtggactagggaactgttttaatgggttagaaaatggtaagtacttctgtgcttccagtggcattccctgtagctgtgaattaattgagagcttactgagtgccaggcattataatcactaagcactttttatgaatatctcatttagttctcacagcaatccaatgaagtagatactattattatttctctgccacatataagaaaactggagaagttaagctcaagattgcccagccaggaaaggacagagctgggatttgaacccaggatacccaagtctaaacctttgggcttagctactgcaaaccaaaaagtatctgagataggccttaatcaacttagaagtttatttttccaaggttaaggacatgcctgggagaaagaaacatggaatcacagaaacaatctgtggtctgtacctttctccaaagatgattttgaggacttcaatatttaaatgggaaaagtgggctgaagaggaaatagggagggtataattcccatgttggaagagaaaggagcaggtagcgggatagtcaattacgtgttgagtacatttgcacttttctcaggataaggtgaacatggagtagctacctgtggagatatttaaccttttatccggcgtaggaacaaaaggaaaggcagcttcttgcataactcagctttcagctttattttttccttttggcagagtgaattggggtcccgagttttttattttcatttcaaactacaaagctaaagtgcttcccacttttaccttcctgtaagagataaacactttttcttctcttacacagtcaacacaacacagaacatttcacctctggaagtgatttttccccatacaccagggagttttccatcggacacaaactggatgttctataattcaattcatatctgacattgtctccctggaaatagcctcagatcccacaagttaaaggcccagtcccacaagactttcctcacttcagatgcctgtcacagtccccgggttaggacctgtacttctgaccaatcagctagaaattgggggttcttatgactcccctccttgagttccattaatttgctagagcagctcacagaacgcagggaaacactttacttacgtttacctatttagtataataaagaatattacaaagatccaggtgaagaaccagatggaagagatgcataggtcaaggtacgtgcttccatggcctctgtgggtgtgccaccctccccaaacctccacttgttcagcaaccaggaagcactctgaacccagtccttttgggttctcatggagacctcattatataggaatgattgattacatcattggccactggtgattaactcaacctttagcaactgtgagcgcctctctccttccccttgttaggggggtgggtaggtggggctggtagttccaatcctctaatcacaatgttggttccctggaaaccaccccctttctgaggctacccaggagcacccctcaaccccttacagcagtcatctcattaacatacagaagacacctcactttggagattccaagggttttaggagctgtgtgccaggaatcagggacccaaaaccaaacatgtgtttcttgttataaatcataacatcacacctcccctccttcttgcccattatttctggttaattttcatactgtttgcttcctaactgaaaaattttctatgattcctcactgactgaggaggaagcataatgcttttatcttggcctccgtggcccacccagcctgggccactgttattctcattacttccccagggaaagccttcctgtagccagactgtttgtggggtttcctaacagaaagcttatctctgcaagtgggtttctgttgttacttagcctggaaaacccttgccattatttctagccacaaattaatttaattcaacaaacatttattgcaggatgtatctgggccaaagagacctggtccctttagaaatttccagagctgataagccatggtccttttccttcaggggatcacagcaataatgtgacgtatccttccaggctgtgctcaaacagtttctccactgcagccttctatgaccgcattaaatgtcagccagatttgtttctgaggtctgagagcatttaatcacatatggccttgaattgctagttagccttccacctatactggaatgttgttactcaaaagtgtttttattgtcaattatatcctaaaaccaggatagaatattttattggattgcaaataaatttgtgtcatgtgttttaccagcatcaaaaagaaaaagacactgtaatttatagggtcaggaaacactcttaaacctggctagactgttaattaatttaagggaaaagaagaatctctgttttctccaaacgttttgcatcccaccaggtggaaaaggatgctggaacttaagaacagcctaagcatgtgcaggaggaaacgaggaaatgacaccgttcagggatttttcatgtaacgaggcacccagtgtaactaacaccatgacagggaaatggttgactgaaattcctcaccctgttacccaacatgctcaaagtgcgctggaacaccttccagaaaggccagcctcagaagcaggtcagcttaaggagcagcaagcatacgccaggccagtgtctctgggggattggcgaggggaatgtccctggacttctgcatcataccctgacagctatgcttcccattcaatgaaaagaaagggaggctactaactgagaggtgatgtcattcttttgtcctctatctataaaatgaagagttggactaaatgagtttaaagtcctttctcttttcttatgatgatggtattctgttaatagcttcatgcttttccctggtgtgtataaaacaaagcatgcttgctttgttataatttcacaagctcccatgcacagcaaaggttatagcctagaatattcacttgtcatcaattttctcagaactttcctccttagactatgctgtgaaatagcagttttgcttttcttaatatctttttcactttttactgatttccaaacacaatgttccatttgaaatggcttagcccctaaaactttggaaactccttcatgtcctaggctgagctcctgtcaccattgagaactcctgtctcatacacagccaccaacacacacatttagcatctggacaacagcaacaatctctatcatttgcgcgatcactgtattctagtgggcttctgtatattgtgagactttgtaaatattatctctggtccttataatatcaataggattgtaagcattattatttccattttacatatgagaacactgaggcctacaaagtttaggagactcagggtgagctagtgaacagctagctggtacaacttaggttcgcttgaaatcaaagtcaataacctttttagaagcaaagctggaggacaacaggaagaagggctgacctctctgagtgcattttctacaaacgatgccttttggataattttgttgccacaattgaaagacattagaggaggtctgtgaaaacaagagtacagaacgtgtaggtattgtggtctcaaggcacctcttccaggaacccaccttcaaatcaatgacacaggtcctgccccccgtgtcttcctcccccaagatcatttctcatagatttttcatcccgtcagtgccatcttctactgcaccaactgggagattcacaggtggaaattgtgagtggagaaacctgttcctaatgcctgtgactatgtgctcaagtgtggacaggagctttcggatgttacagcctagtgtgaagacagatgttccctacccaactctgtggcaaatcttgttataaagtggaataagctttcctgatgtgaacagagcttctaattaacctcctccatatactgtgttcaggttttgcaaattagatctctttgaagtgaagtgcacctttattctaactaacgtatgtactcacaggcgagtcccacctatccagttttacaaaccttactttacatctcattgaccttgaatgtccctaagaaaggtcccaccagggctgctagtgtccagcagttgggaagttccagcctggggaggatgttggggccagggtggggagagcctgtcttgtagtagaggctacagctgtggctaatctgtgatttagccagctgctgcagctgctgaaaggcttccttgcatggaaaaactatttcataatctccagatccctttttggtagaaagaggtttcagtcctgcaaagctggcctcttccagcaatgtggcctatcatggaggtcccatctctgaggccttcctcccattcctgtgtctcagcacctgatccccatcgggggaatggtcaaggagagcaagctctgtgaagagccccttctgagttgagttgctgtggttagagaactgagagaaaagggaaggcagggggccaagagctgtgactggcactgtgagcttggagaagtcacatctcctctcttaaacttctttaaacctccaggtctcctataaccctggtcataatatgattcagttttaccttcctactcttcatacccaagatgctgtttcctggttcttctccatcccttgagtgctctgggactggtgggagagaaaggagctacagagctggctgctgcttcctctttccacccatgtggacatgatggatctttcctttatttatttacttttatttatttattatttttatttatttatttatttatttatttatttatttatttattttgagactgagtcttgctatgtcacctaggctggagtgtggtgcatgatctcggcttactgcaacctctgccttccaagttcaagccattctcgtgcctcagcctcccgagtagctgggattacaggcatgtaccaccctgcccggctaattttttgtgtttttagtagagacagggttttgccatgttggccaggctagtctcgaactcctggcctcaagtgatccacccagcttcacctcccaaagtgctggaattacaggtatgagctgttgtgcctggctatgatatatttttcaatacacacaggcagcaccaaccccacaaagccacaggcctctgctgtgggtcctggaagcaatggtagcaagcaccaatctggggcagggagatggggtgggaggcactgctgggacctggggttgtacagatgtggatgcttttgagaaggtgagggccatgaacttcacgagcaggactgctagggtgttcttgctcgcttcttcctgcctccttagttttccatttccactttgtcactaatttccccagattgagatattggttttggatggctcttgtcatctcttccctatgacatgcaggatcatgtcttgcacagaaagttgtaacaggatggggagagagttctctctatcgttgcactcttttccttgactgtcctcttacagcctgctggagcctccagaggccctggccatggggtcagacagtgggtgcctgcatcctaattgtccactctgtcattcctggaggcccacaagtggcagactattgtgagactattggctctgagctcacagtgccagtcacagtgagactattgtctcacaaggcaatagttcaagaacgagtttctctctctagttactgtctattactgctgctggatttcatgtcacagtaacctttcagttcacactttactttatttataatttattattattattagttgcaaaggaaaatgctattgatagtgctgcttaggacatagacatataaagtggaaatgtatagtctttgttagataagaatgagttcaaatcttggctctaccacttaatgtatccaaaagcaaacgcttggtcctcttcctctccccactccctactgcaaatgcttccctccctcagatatccctgtctctataaatggccactccattttgcaaattacttgggccccaagccaacaaatcattcattgtatcccatgttgaatccatcagcagattatgacagccttacctttgaaagctccaaagccagccttccccatgaccctcattactgctgcagtggcctgcacccccaccatcttgcatatacaccactgaagcagcctcctgggtgaccttcactcttggttcactagagtgagtattctcctcagaagccagagggatcctttgatagcccaagtcagatcaggtcattcttcttttcaaagcccccagagacttctcttgttacttagtgtaaaagacaatgtcattacaatggccttcaaggccatccatagtccactgtccctctcacttccctggcctcccctccagccgcttgacttaactctgtctagatgcactggcctccttgctgttgcttgaacacatgaagcaggaccttgggttagcagggacatgtgtcaaagaaaaaatgagagattttctaaggtcatgggctcaggatatgttcttgggaagcacagtctctaggacacagctggcatattgttctgggttatttctttttgaatataagctccacattggtggggatttctgactgttttgctcattggtaactcttaaatgtcattacattccctgacacataatggatgttcagtgaagtgctgttgaatgaatgaagtgagttttggagatttgtatttgaaaagagagagaggagcatgtgtagataaaagtgccaggtctggaaactgtgatttggaagcaatgaacaggggaggtgatgttgttttgatttgaggagaactagggaggggaatgatgactcttcttgaatacttgctggttggtcttctggaaggggaattagatgtattctctctgtctacctagggtagacaattagaaggagttacatttgaaggagttttctctaatatgttcagtagtctgcaaatggaaaatggaatggattgtgttgtctattggagagtcctttcttagtttagggttcaagcagaagccagttgtccacttgtcactgatgatggagagacccccttgtattgcataaactattgaactaggtcacccaggtgaactagatctttaacaatctatgatcttgactaaccaactggtttctctgatttttctttctcatgtgtttttatgaagaaattgacagtccaaccaatgttgtcactgatcgagtgactgaagacacagcaactgtctcctgggacccagtgcaggctgtcatagacaagtatgtagtgcgctacacttctgctgatggggacaccaaggaaatggcagtgcacaaggatgagagcagcactgtcctgacgggcctgaagccaggagaggcatacaaggtctacgtgtgggctgaaaggggcaaccaggggagcaagaaagctgacaccaatgccctcacaggtaacagaaggacgggagcataaataggtttcctcatggcagggagaaggttgatttttgaatcaggaggtcattgctcacctggcatcagctcttttgtttgcaggagtggggaggaggttgcaaaaccaattttgattttcataattatatatatttttcctttttaacatcaaacaaaagagatcagctttttcacttgatgcagaaggtcatacttatttgagttggaattccgtatgcaaccccctcagaatagagtaacacttcctaattttcattttttagatgtgaaaactcaaaacattgggctgacagtgaatttgaatgcttatctcagtttgcagtggctgtgcaggcactttgcatataatctggagctctcttttagaccgtggaaatagtttgcatcctaagtcaacatttactaaatggaccaattcttcctttaagctttcagaagccatgagggttctcatacttcacccagtcattctgctcagtttgcgcctgcaggggtcctgggactatactgggacatagcccagccattctttctgcttaaatcctctcctggtgcttctctgaatttagagcagcctgatcctggtgcccgcatgaggttccaaaacacctggcaggaaatcagagggaaaggcttcgcttattgtttgcattctattctggacagttactgagtatagagactctcagagaagcagagagatggttaggaatatggtttcagaaaattgactgtccaggttttaaccccagctctgccattgactagctgagtggctttgagcaagttactttacttccgttcctgtttcttatggcacaagtgagagcaatgattttttagaatgttaatcagtatttggctcttgaaagatttcgtggtgcacagcctcctagatccatgtgggcctcaatagttgacctcttcttcaggggagcagagaagatattgacagtaaggatggtgatatctaaatctgtttaaagtcaaagtcagcaaatttctgtaaaggaccagatagtaaatatttttggctttgggggtccaacagtttctattgcaattacttaactctgccattggagcatgaaaacagccacagacaatgatgtgtaaatggactggtgtgactgtgttccgataagactttattgataaagattgacagtggatcagatttggcctgtgggttgtagattgcccctcctggtttacattacacgtgactctctgtttactaggattttgagtgtcgtgaaaagaaagagcatttgggtcagcatttttgtttgtttgtttgttttgttttgtttgagacagagtctcgctctcttgcccaggctggagtgcaatggcgcaatctgggctcactgcaacctccatctcccgggttcaagcgattctcctgcctcagcctcccaagtagctgggatttcaggcacccgccaccacgcccagctaatttttgtatttttaatagagacgggttttcactgtgttccccaggctggtctcgaactcctgagctcaagcaatccaccctcctcggcctcccaaagtgctgggaaatacaggcgtgagccaccacgcccggcccatttttaaaacaaaggaagttggaatagagaagaaccttcccttttcttaggcggtggtggtgtgagcagcagggagcctctggagggtggcattgccactgggaaggggtcagaccagagctgagctctgggggcacaaacatgaaggaagtgattcacgcctgtatggcattcacaatcctctgggtagagaagacaagttaaaaagataaaggacagtgagttatgttctagagcaaacaaatgtccctggagctatgggaaactgaagaaaggggacctaccacagactaggacaggataggggtcatgcaggctgtgggaggaggtgacacctgaacaaagcctggaaggacgggtgggagttagcagtggaggcagcatatgcagaggctaagttgtgagaatatgacaggttaggtcatctcaaggggttttaatggagggccggtctgtgtgtttggtgcactagtgaaggataagccagctcagaatcctgggtgctaaatcatttgtcctcatgtcagatgtctgtggtgcatgctgaactttgctccctagggtgagtcactgcatgtggctgtgcattccaccatgctggcctgtcccccttggcaagtggtcctgtgcaggtatgaaatgcaggtgctgtcacaaaaagtacagccttttttgaggaggtagtttctaaaagaggataataaagtcatgctaaccatacacacaattgcttggatttttgactccctaaggatgtacattttgaggagaaagtggtatttcatgcctcaaatgccattaataataacaacttatatttaagcatttgctatgcaatatctcatttactatcaccataacctatgaggtaggtagtggtatttctttcttcatagagttgaggagacagacacttaaattacacggcttgtccaaagttagccaccaggaagagatggagcccaggttctaacccactttaatcacagagaaacccagacagattctacaagtttgattctttttattagaccagacctcagatactatcaattaaaaagtctcctggttccctggccacagatgtaatgttttatatggaaagaactgatggctactacttctaggatatttttcttctcaaagaacatattagagcagatgcagaggtttattcagtataattgctttctagtacaaggagtcaggaactagaagaatatgttatataaatccagggtaaaggagaaatttgaatgtgaagaccaattatttttatcccaaagcgacttccgggaaaagtttatagagttgataaagatgctggctttgtctgaaaactccacttcttattaaatgttattagcttattactggaatttcagaccatttgcttaattagacctttacattaactcaatcattgacatattagagactctgacatttgttgaggttatcactttgactgtgttcgtgctgtctttatggaattagagggtggtaaaggctacattcttctttcatctctctcttaaagaaattgacagcccagcaaacctggtgactgaccgggtgactgagaataccgccaccatctcctgggacccggtacaggccaccattgacaagtacgtggtgcgctacacctctgctgacgaccaagagaccagagaggttctggtggggaaggagcagagcagcactgtcctgacaggcctgaggccaggtgtggagtacacagtgcatgtctgggcccagaagggggaccgagagagcaagaaggctgacaccaacgccccgacaggtaacaaaagagagatggtcaattggaattgagttttagcttgtggatttgaataggtatggtatcaaaggatgtggcctgagcagaaagactttgcaattagaagtcttaaagatgaaagaaagactgagctctcgtggtgatggcggtgggctgctctttcctgacagtgatgagctgttcatgagaccacttggcccactgaaagagagaagtaaagtcttatagtaacaatgcttttagcagaagatgggtacaggatctggtcattgcagtgcttgtgataatatttttagagtgctcatcagtgaagtagcccttgataaaatgttatgttaggaaccctaaatgtcatggcagctgtttaattggaggttgtgatgtgccatatgctgctgagaagacatcgttcctccaacattttagggaactgaaagccaagaaagaatgcctcatttataatgattcctcctttgaagttcagaaccaagggctactttctccttagactcccagcggagactcaggatgagaatgccattgccttgttctaaaagagctctggaagatgaaaatgatgaagatgggggtaaggatatgtcttccatggcttcagagcttaaacctttccaaacattttccttccagatattgacagccccaaaaacctggtgactgaccgggtgacagagaatatggccacggtctcctgggacccggtgcaggccgccattgacaagtacgtggtgcgctacacctctgctggtggagagaccagggaggttccggtggggaaggagcagagcagcacagtcctgacaggcctgagaccgggtatggagtacatggtgcacgtgtgggcccagaagggggaccaggagagcaagaaggccgacaccaaggcccagacaggtaaggagtgtgcattattgctgtgccgatgccatgctcagggtctgtctacatggggttttcttctctgaccttggcataaagggggactttatggaagagcaggttggtatcctcccataatacattgtgtccccctcacttccttttactggcctctcttagaatgcctaagtggtggtctccaaactctggtctttaaagatggctgatcactgcacatagttctttgttctttctttgcctgagtacctttgtcattaacacactaactgcttctccttgacaaggagtaaatattaagaagtaactatcatgctgagggagccagacttagggattgtgatcaatcccttaaaaaaaattcctcacctgtttaaaccctttgcaagcttgtttgtttttgttcctgccatctgaatgaatgttttaggcagaaataataacagtgtttccattagctaaaaataaaatatctagtcatttttagtcccccagatgtaattatgtctattttcatgtaatagtccctacttccctacatgaaatcttctcctctctctcgacttgggccacctgtgggccagctgcctgctccaggcaggggacatgcacaatttctcttgtattttctgctgtgtacctcaagcactgctcttctagcttgctgtatgcagtttctcacccatttatctttggcgttgctgggagaggtaaactgatgagaggtgaggggtgaggacgggcagaagtgaagggtcaggaaggaggagaggtgaagggtcaaggggaaggagaggtgaggggtcaggaggagaagaggtaaggggtcagaggaggagaagtgaggggtcagtaaggaggaaaggtgaggggtcaggaagaggagagatgaggcatcaggaggaggacaagtgaggggttgggaagaggagaggtgaggcgtcagtaagaggagaggtaagggtcctggaagaggagagatgagggctcaggaggaggagaggtgaggggtcaggaggaggagaggtgaggggtcaggaggaggagaggtgaggggtcaggaggaagcgaagtgaagggtcaagagagaatagagcccaggggttagggaggagggagctgggggtcgtggaaagtcatgcttgactgtaacaggtgtttgggcctgccctggagcctgacgagtgctaaagctgactcggtcatgaagcacttctgtgctcctcttctacttgggtctctcactgtaggcaaatgcctgtcttccactggtctcttactccccttcctctgccaatacatcaggggttcccccagcgcctctctggtggggttgccttgcccctctaggtggtcctcttggacagcttcccaggcctaccttgctgtgctaggcccaagtctggtccatggagaacctgcatgcatcctttgtccattcaaccagatgcacagctcttttgcaatgctacagcctgtctttgctctgtgtcagagcaaccagctattttcttatctcttagatattttagcatatgtcagacaccagcccgtatgattccccaagctttgggctttctcacccttggcactattgctatcttggggtggataattctttgctgcagaggtctatcttgtgcattgtaagatgtttagcagcatccctgatgtctccccctatcccacactgagttgtgacaaccaaaagtgtctccagacattgctgactgcccctggttgagaactgctgctctagggtatgcaaaacaaagtctgtaagggattccattgaaaactgcttattcaaggcttgggcctcacccatgggactcacagtgtatctttttccaaataaatcccttcttcaagtcccacctcactggcttctccaatgtcttttatagggcgaaaatgattggtcagccaagggtcacaaaactgttgttgatcttgccttgactgtggttcctcaggttggaatgtagatatccattttcttggggttacagcctaaagcaacatgtgtaataggacgtatgagcaagtgactttgggaaaacggcttttgcaatgaattatttaggacaaagaaatgctagtttttttttttggtgaatgtatttttaagtatcttctatgtatgtggtatggaggaacataatttcttgtatttataatgtatcaacaaactggtgttaataatgatagcttatggtcattgggcatctactcagtgctaagaactcataatagacatttgtttcttttttaaaaaaattgatacataataatatacatatttataggtacatgtgatgttctaatacatgcatgcaatgtgtgatgatcaaatcagggtaatcaggatatccatcagctcaacatttggcatttctttgagttagaaacatgtcaaatcttctcttctagctattttgaaatgtacaataaatcattgttaactgtagtcatcctgtgtccggaattggtgggttcttggtctcactgacttcaagaatgaagctgcggaccctcgcggtgagtgttacagctcttaaggtggcgcatctggagtctgtcccttgtgatgttcagatgtgttcggagtttcttccttctggtgggttcgtggtctctggtctcgctggatcaggagtgaagctgcagaccttcgcggtgagtgttacagctcttaaggcagcgcgtctggagttgttggttcctcccggtgggctcgtggtctcgctgggctcaggagtgaagctgcagatcttcgcggtgttacagctcataaaaccagcgtggacccaaagagtgagcagtagcaagatttattgcaaagagcgaaagaacaaagcttccacagtgtggaaggggacccgagaaggttgccaatgctggctcgggcagcctgcttttattgtcttttctggccccacccacatcctgctgattggtagagccgagtggcctgttttgtcagggcgctgattggtgcgtttacaatccctgagctagatacaaaggttctccacgtccccatcagattagttagatacagagtttctacacacaggttctccagggccccaccagagcagctagatacagagtgtcgattggtgcactcacaaaccttgagctaaacacagggtgctgattggggtatttacaatccctgagctagacataaaggttcaccaaggccccaccagagcagctagatacacagtgtcgattggtgcactcacaaaccttgagctaaacagagggtgctgattggtgtatttacaaaccttgagctagatacagagtgccgattggtgtatttacaatccttgagctagacataaaggttctccacatcctcaccagagcagctagatacggagtgttgattggtgcactcacaaaccttgagctaaacacagggtgctggttggggtatttacaatccctgagctagacataaaggttctccaaggccccaccagagcagctagatacagagtgttgattggtgcactcacaaaccttgagctagacacagggtgctgattggtgtgtttacaatccctgagctagatataaagactctccacgtccccaccagactcaggagcccagctggcttcacccagtggatcccgcactggggctgcaggtggagctgtctgccagtcccgcgccatgaacttgtactcctcagcccttgggtagtcgacgggactgggtgccatggagcaggggatggtattcgtcggggaggctcgggctgcacaggaacccacagaggttggggaaggcttaggcatggcgggctgcaggtcccgagtcctgcccggcgggaaggcagctaaggctcggcgagaaatcgagcgcagtgccggtgggctggcactgctgggggacccagtacaccctccgcagctgctggcccgggtgctaagcccctcactgcccggggccagcagggctggccggctgctctgagtgcggggccctccaagcccatgcccacctagaactccagctggcccgcaagcaccatgcgcagccctggttcccactcgcgcctctccctccacacctccccgcaagctgagggagtgggctccagccttggccagcccagaaaggggctcccacagtgtagtggtggactgaagggctcctcaaatgctgccaaagtgggagcccaggcagaggaggtgccaagagcaagtgagggctctgaggactgccagcatgctgtcacctctcaatcccccctctaaacaggacaccccaactgctgttggcaatttggccgatgaccactctagctacttcctgctggatggggcaaagaaggggccctgcagttgcggtgtccttcagaggggaactctctaggccaggggaagtgccagtgggttgatccaggggtcctcggtagaagttgttagttgaactcttttggggttccatttgtaagaccatctgtagcttgatggcctcgattctagaggaaacaaatttgacaagaaggttaaaaatacagggcccaaaggcgagtaacagcaagatggctgccacaggacctagaaaggggagaagccatgttgcctaactccagaagttggtataagaatttgaaaggcgttgtctgatttcagaagccttttcctgtaaactccgggcagcatctcatactatccccgactggttagtgtaaaaacaacattcttcccctaagaaggtgtagtgtcctcctttttcagcagtgaggaggtctaggcctctgcagttttggagagtcactgctgccaaagagtctatttgggattgtaaagtaaggatagatttcattatttcttgcaaactgtctgagaggcagatatgggttgaagatccacataagtagaatatgccttggctgggtagatagaaatttaccctggcttttaaaggaatgggatatgctgtttttttctttactacttctatctctctctttctctcttcgacttcttctttgtcttttcctttcttcttaactttttttttgactttctgtgtctgtccctctttctgactccttttttttgtctctgtttctgactacctctttgactttctgtctctttgtctcttcctctctctgtctctttctctgactttctctttctctcttttcttcttgctggtctttccctacctctgccagccgcttatgctgctgttctcctctctccttcccattttgatggctttgtcagtgtaagattcctacctctttgtgtttttttgcattacgtgactgtgcgggcatttttttgcccttctaaattgtccttccaatgcccagacttcagtgttgattccctcctcaagtaggggacaacaaatgggtaacttgttccccatatttatgtagataatagctccagccttggctaatatatccctccctaataagggtgtgggactttcagacataacaagaaagccatgtgaaaagagcaaagtctcccaattacaactgaggaggtgggagaaatacctgattacaggctgtcccaggattcctcggatggtaacagaccttgaggacagttgtctaggacaggagattaacactgagaaggccgcgccagtatccaggaggaagtcaatttcctggccctcaatagttaaacatacccagggctcagtgagggtgatgacatgagctggtgcttgccccgggcaccctcagtcctgttgttggatcatctggttgggggcttctaacccagggaaccttcatcctctggggcagtgcaccttccagtgattgcctcggcatagtggacacggatgagggggcagcttgtttcttattggacaatcttttttaaagtgtcctagtaaaccgcactgataacaagccgtaccaggtgattggcctgctccattttctgacctctctgaaccaccaaggtttgtttgtctgagggccatgactaaggctgcggcctttctctgatctcgcttttccttttgggcctgttcctcttggtccctattatagaacaccaaggttgccaggtttaataatgtctctagattttgttcagggctcagggcttgcttttggagctttctcctgatatctgtggctgattgggtaataaacttatcttttagaatcaattgaccctcgagtgattcgggtgacaggggagtatattttcttaaggcctcttgtagccgctcgaggaaggcagaaggattttcttcctttccctgggttatggtggatatcattgaataattcatgggctttttcccaattctccttagtccttccagaacacagatcaacagatgtttacgactccagtccccatgatctgagtcaaagtcccagtggggatccatactggggatggcttgctgaccagtagggaagttgtccctttcttcggctgtcattctttcatttacttgactaggataccaggtatctccaaactctcaggctgcagctaaagccgcattcttttcattaaaggccagggtttgatctaacagtagcatgacgtctctccaagtgaggtcaaaggtttgccctagaccctgtaggacatctatgtacctatcaggatcatctgaaaacttccccaggtctgccttgatctgctttaaatcagagagggagaaggggacatgcacccgggttgggccaaattcccctccccctacagcttgaaggggacataaccgatagcccgggggtttttgtggacctttggagatttctttgcttatttccttctgggcaggggagattagaggaggagtatcatcaataggaagggaagctatagggaggctaggatatgggggtaagctgaggggtcctcctgtgggatgtaaattgcaagctttgcatagttgtgtattctccctcaatgaaaagaaagcttggacataaggtatttcactccatttgccttccctcttacagaaaagatcaagctgcaggatagtattgtaatttgtgcttccctcaggtggccatttttccccatcagaaagagaatattggggccaagccgtagtgcaggaaaaaatgagcctcctctttttcagggtttgtgggtcaaattggtcccaatggcttaggatgcatttcaagggtgaacctgttgatgcctgagtgtttcccatatgaaagacaaaaccgcccacagttttggtttgttttgtttctctccctgcccaaggacctgcaatggtcctgggaccctgctgatcagaatagttgcattcaccaatgcagcagcagaaacaacccctgcccaagaacctgcaacggtccctggaccctgctgacttgaatagttgcgctcaccgacgcagcagcagaaacactagttttcctcccagaccacatggaggaccgaggaaggtcggatttagtggtccttactgacgcattctcgaaaacctgcacccttgcctgtcctcctagaccacaaggaggaccgactgagaaaaatcagatttagtggcccttactgacgcattctcaaaaaacctgttagagtcctaagcattctcctgttagtattgggactttaccccatcctataaagatgttatgccacaaaaatgaaatggagggccataccctgagggagggaggggatcttcagggttggaagagtgacaccttttgttctcacttatatgaataggaaggatacaatttctgaggctccccatatcctagcttcaggaataacttttgttaggcctgttagtctgaggagggatcctaaaattcctagtagtccccactacagcagggctttgggcaaaaactgtgtctttctgattggtgagcctgggtgcctaaagaaggtaacagagtcctggagtttatactagaagtcattcttataggagaaacaagaaaagcaccagaggcaggtagcaatttttagaagcgggtctagcctcagagaagagaggcgagaggaagtttgtctggcaggcattaggacccagagggcaagggtcaggatagataggatagataggcgagtgtcgcttgggcgacatgcttttgagagttccactcatggccgcagggtcaaccaacatgttgtcgggaccccggagatgcatggctttcctcactgtcaacccacggctcagcccagaagtacaggaaaagcggaagctggttctaggcaaaccaacggtcccaactccaaagagttgggggttgttagagagccctttcccagaaagcttgacacccgtgtctttagtccggcggcccgctagtcacttttaaatggctgacagatgcccggtatttagcccccgaattctaaagaaagataggacagaatagcaagtgaaaggggtccgatggtactcactgcttggcgattgggaaaggtctcaccgctcggctattgtctcaccgcttggcgatatgcgaaagtcccttcgtggtcgccaaaatgtgtccggaattggtgggttcttggtctcactgacttcaaggatgaagccgcaaaccctcgtggtgagtgttacagctcttaaggtggcgcatctggagtctgtcccttctgatgttcagatgtgtttggagtttcttccttctggtgggttcgtggtcttgctggctcaggagtgaagctgcagaccttcgtggtgagtgttacagctcttaaggtggcgcatctggagtctgtcccttctgatgttctgatgtgttcggagtttcttccttctggtgggttcgtggtctcgctggctcaggagtgaagctgcagaccttcgtggtgagtgttacagctcttaaggcagcacgtctggagttgttcgttcctcccagtgggctcatggtcttgctgggctcaggagtgaagctgcagatcttcgcggtgagtgttacagctcataaaagcagcgtggacccaaagagtgagcagtagcaagatttattgcaaagagcgaaagaacaaagcttccacagtgtggaaggggacccgagaaggttgccaatgctggctcgggcagcctgcttttattgtcttttctggccccacccacatcctgctgattggtagagccgagtggcctgttttgtcagggcgctgattggtgcgtttacaatccctgagctagatacaaaggttctccacgtccccatcagattagttagatacagagtttctacacacaggttctccagggccccaccagagcagctagatacagagtgtcgattggtgcactcacaaaccttgagctaaacacagggtgctgattggggtatttacaatccctgagctagacataaaggttcaccaaggccccaccagagcagctagatacacagtgtcgattggtgcactcacaaaccttgagctaaacagagggtgctgattggtgtatttacaaaccttgagctagatacagagtgccgattggtgtatttacaatccttgagctagacataaaggttctccacatcctcaccagagcagctagatacggagtgttgattggtgcactcacaaaccttgagctaaacacagggtgctggttggggtatttacaatccctgagctagacataaaggttctccaaggccccaccagagcagctagatacagagtgttgattggtgcactcacaaaccttgagctagacacagggtgctgattggtgtgtttacaatctctgagctagatataaagactctccacgtccccaccagaccaggagcccagctggcttcaccgagtggatcccgcactggggctgcaggtggagctgcctgccagtcccatgccatgagctcgtactcgtcagcccttgggtggtcgatgggactgggcgccgtggagcaggggatggtattcgttggggaggctcgggctgcacaggaacccacggaggcaggggaaggcttaggcatggcgggctgcaggtctcgagccctgccccgtgggaaggcagctaaggctcagcgagaaatcgagcgtagcgccggtgggctggcactgctgggggacccagtacaccctccgcagctgctggcccgggtgctaagcccctcactgcccggggccagcagggctggccggctgctctgagtgcggggccctccaagcccatgcccacctagaactccagctggcccgcaagcaccatgtgcagccctggttcccgctcacgcctctccctccacacctccccgcaagctgagggagtgggctccagccttggccagcccagaaaggggctcccacagtgtagtggtgggctgaagggctcctcaaatgctgccaaagtgggagcccaggcagaggaggtgccaagagcaagtgagggctctgaggactgccagcacgctgtcacctcttaatcctactgtgctatcaaacactagaatgtatttcttctatctaactgtatttttttttttttttttttttttttttgagacggagtctcgctctgtcgcccaggccggactgcggactgcagtggcgcaatctcggctcactgcaagctccgcttcccgggttcacgccattctcctgcctcagcctcccgagtagctgggactacaggcgcccgccaccgcgcccggctaattttttgtatttttagtagagacggggtttcaccttgttagccaggatggtctcgatctcctgacctcatgatgcacccgcctcggcctcccaaagtgctgggattacaggcgtgagccaccgggcccggcctatctaactgtatttttaaacccttaagccaacctgtgttcattccccttactcctacacttcctagcctctggcaaccatcattttattcgcaacttccaggagatcaatttttttagctcccacatatgagtaagaacatgcaatgtttgtgtttctgtgcctggcttatttcacttaacataataacctccagtttgatctgtgttgctgcaaaggaaaggattttattcctttttatggctgaatggtattctgttgtgtatgtatatgtgtatatatatattatatatatatatacacatacatatgtattatatatatacacacatacatatatatatatcaaaatttccttatccatccactagtggacagttaggttaattcagtattttggttattatgaatagtgctgcagtaaacatgggcatgcagctatctctttgatatactgatttccttttttttggatgtatactcagcagtgaggttgctggatcatatggtacatctatttttagttttttgaggaaactccatgcttttactcatagtggctgtactaattgccattcccaccagcagtgaactagtattcccctttctccacatcctcaccagtacctgttattgtttgtctttttgataatagcagttttaacagggatgagatgatatctcaatgtgattttgatttgcatttccctgatgattagtgatgttgaacattttttcgtaaatgtttgttggtcatttgtatgtcttcttttgagaaatgtctatttagatcatttgcccattttaaaataagatgatgatgatgattgttattattattttgctattgagtttgaactccttatgtattctgtttattaatactttatcacatagacagcttgcaaatagtttctcccattatgtaggttgtctctgcattctgtcgattatttcctttgctgtgcaaaagcttttcagcttgatgtatttccatttgtctatttttgcttttgttgcctgtgcttttgcagtcttacccaaaatatctgcctagaccaatgttctaaagtgtttcaccaatgttttcttctgtagtttcatagtttcaggtcttacatttaattctttaatccactttaatttaatttttgaatacggtgagaaatagaggtctagttttattcttctgcatatggatattcaattttcctagaactatttattgatgagcctgttctttccccattgaatgttcttggttacttgtcaaaaatcagttggcagtaaatatgtggatttatttctgggttctctattctgttccattgtgcctatgtgtccgtttttatgccaggtccaagctgttttggttactgtagctttgtagtacatattagagtcagctcatgtgatgcctccagctttgttatttttgctcaggatttctttggctatttggggtcttctgtggttccatatgaattttagaatttttttttctaggctgggtgcagtggctcatgcctgtaatcccagcactttgggaggtcaaggcgggtggatcatttgaggtcaggagttcaagaccagcctggccaacatggtgaaaccctgtttctactaaaaatacaagaaaaaaaaaaagggctgggtgcggtagctcacgcctgtaatcccagtactttgggaggccaaggcaggtggatcacctgaggacagaagttcgagaccagcctggccaacacggtgaaactccgtctctactataaatacaaaaattagctgaatgtggtggcaggtgcctgtaatcccagttacttgggaggctgaggcaggagaatcgcttgaacctgggaggcagaggttgcagtgagccaagatcacaccattgcactccagcctgggcaacaagagtgaaactccgtctcaaaacaaaagcaaaaataattagctgggcatgatggtgcacgcctgtaatcccagctactggggaggctgaggcaggagaatcacttgaacccaggagatggaggtcgcagtgagctgagatcatgccactgcactccagcctgggaaacagagcgagactctgtctcaaaaaaaaaaaaaaaaaaaaaaaaaaaaagaattgtttttctaaagaatgtcattgatattttgatacagattgcattgaatctatagattgcttttgggagtacaattttttttacaatattcttcccattcatagacataggatatatttccattttttggtgacatcttcaatttctttcatcagtgttttatggtttttccttgcagcgatctttcacctctttggttaaatttatttatgggtgtgtttttaaaagtagctattgtaaaagggattgcttccttgatttttttttttatgctagttcattgctggtatatagaaacactactgatttttatatgctaattttgtatcgtgaaactttattgaatttatcagctctaagagtgtcttggtggagcttgttagggttttctatatatgagatcatgttatctgcaaacagggacaatttggcttcctctttttcaatttggatgctctttattcctttctgttgcctaattgctctggctaggacttccagtactatgttgaataagagtggtaagagtggtcatccttgtcttgttctggttcttagagaaaagctttcagtttttccccaatcagtgtattgttaaatatgggtttgtcttatatggcctttagagtgttgaggtatgctttttttatatctagcttgtttagggtttttatcatgaaacgttgttgaatgttatcaaatgctttttgcatctattgagatgatatttttttttattcttcattgtgtttatgtgatgtgtcacatttattgatttgtgtatgttaactattcttgcatccctgtgataaatctcacttgtatcctcttgctgaattgatctctttttctttacataataacctcctttgcctctttttatacttttgacttaaaaaatctgtttaatctcatataagcatagctactcctgtttgcttttggtttctgtttacatggaatatctttttccatcctttcactttgcatctatatgtgtttccacaggtgaaggaagattcttgtaggtagcacataagtgggtcatttttttaaagatccattcagccggccgatctttttttttttttttttttttttttttttttttttttgaggcaaagcctcactctgttgtccaggctggaatgcagtggtgtaatctcggctcactgcaacctctgcttctcaggttcaagtgattctcccacctcaaccctccaagtagctgggactataggcatgtgccaccatgtctggctaatttttttttgtatttttagtagagacagggtttcaccatgttggctaggctggtctcaaactcctgaccttcaagtgatctgcctgcctcgacctcccaaagtgctgggattacaggcatgagccctatgcccggcctcagcaagtctatcttttaagtggggaatttaatccatttacatccaaggttattattgataggagaggagtgactcctgtcatttgtaaattgttttctagattattttgtatatcctttgttaatttcttcttctattattgtttcttattgtgatttggtaggtttttgtagtactgaggcttgatccttttctttctcctttgtgtatctgctctgccagtgagtttatacttttctatgttctcatgattgtgattatcatctttttgcttccaaacgtaggactcccttgagcatttcttgtagagccagtttagtggtgatggattccctcagtttttccttttctgggaaagactttgtttctccctcatttctgaagaatagacttgctgggtgtggtattctcagttgacagctttttttccacccctttcagatcttgggctatatcatccctttctctcctggcctgtaagatttctgctgagaattttgctgtttgtctaatgggattcccttatatgtgacctaacacttttcttttactgtttttagaattttctctttgtctttgactattgacaacttgactataatatacttcaggaaggacctttttggggttgaatctatttagggacttgagcttcctagatctgaatattcatatctctccccagacttgggacattttcagctattatttcattaagtaggttttctatacctttttacatctcttttctttctggaactcctgtaatatgaatatttattcacttaatagtatcccttaggttttgtaggctttctttactctttttcatttttatttcttttctttctctcactgggtaatgtcaaacaatttatcttcaagttcagagatccttttttctgcttgatcaagtctgctgtggaagctcttcattatatttttaaattccattcattgaattcattagctgtgtttcttttttgtgatatctatctcttcactgaatttctcattcatatcatgtattatttttctgatttcatcaaatagtctatctgtattttttgaatttcattaagtttccttaagatcattattttgaattccttttctgacaatgtatcgatttctttttaattggggtctgtttctagagagttattatgttcctttggtggtgtcatgttttcttgctttcttcatgttccttgtgtccttgcattgaggtctgtgtatctggtggaacaattgcctcttctaaactttctagagtggctttcttagagaaatacttttacctcagttgaattttaatgtgccagttgggaagggtggttcacgtaggttcggtggtatagtctttgtgcagcttctttggctgtgtttgacatcagcaataactatgggcatatcagtggcctagactacagaagtttgtggtagtggtggtggcagtataggttgttaatgtccttggtagcaagggctattctattcttattttctccataatgggaagacttagctgaaagtctccctcttggggtcaggtctgacatggcatagaagcagttgccatgacactgggtttcaagtacaggtgctcaaagcaactgtggggcaaggtcttacttaggctcaaggtcttgtgaacctatagtggcacttgagtcttgggatgcagagtgatctctgtgtcagggctggatataggatgcctatagtgcctagcagcttggcttcagggggtcagtttgtaactgtaattctacccctgatgggcagggtgcagccgtggtttaacttggaggaagaagaagtgctctggaagtgtgagaccaggttgcaggatatggctgtaattgctgtaatttggaaacctgcaccaatagagctcagtggcaacttggatccctaggggtgaggaattgtgtagtggggattctaaactctacaatggtgggacttggcagtatcccagtctctgtaaggccagatgcagcagcagcaagcatcccaaaataatcaagcacactgttttttgggctgtaccagggcagggagcagcacaacaatgactctactccctgggagaagagtgtctcaggagctcagactcagggggcctagtccagctctagggaagaataatactagagttgtctggccagtagggtggggtgtcttagccaaccactgctgtatttccctgggacctagggtactatgtcagcacagccctaggacgtgcagctgctcagcttggttgaggcactgattccccagtgggcaatgtgccactccagctcagtcctgagggatgtgactatgctggatggcctcaacaccattttcctgggatatagggctctgccaaaagcattgttccctggggagcttccctgaggagctgaaactagtgcagtttcagctcaggcccctacgagtagagtgctgcctagtgtgacagaagtggatggagctgttttaccaaagtaatgattctccacgaaagagcgtgcagtttcagctctggaatgagtgggtaggggagggggatgtggagtcgttccactgctgcttggccccatggggaaaggtgtaacagttgctcacagctccgcttggagatgtcaggtcactgggtggtggtgtctcagcagcagtttacccttagggatgaaggggtgaatggctactcaccccgagagcaagacacattccaacagtagctccagttccaagacaccaagacggtgtagtacaatagccatgcaggccacagggggtggggcacagtgttggctccatttctgagggagcacagttgtgtacctgtaggcagctccctcagctgggcttagtgcctctgagagctgtaggagatcccagtggtgaggactgtaggtgtacaaggtgctgataggggctactgggatcttcttgcttacgttttgctgtagggagaagttcttcctggtttccagctgctcttacctgggcaatggggtggtggggtcccagtgtttccttctgttctctatgtggccatcctgagtttctgtgctcaccagagtttctgtttctcctttgacagaattctgcactctcctttagttattttttttttaaatgtcgttgtttattcttttagttgtttttgtgcagaagatgagtgtcagggatttctaactggccatcttgctgatgtcacactaggagacatgttattagctcatataatattcacaataactctgtagaatatgtactaatattatttttccctgccttttttttcttgtggagaaaattgaggcagagaggtaggtttgcccttaattatattttaaattatagagtaaatattctgtggcttcagagtggtaaacactgtaatactttaacattttcaaagcccctttgctacatatcatttttttctcttggtttacagagctactcagagtgataagtgcaataatcattaacaaccccttgttacaaatacagaagtaaagcaacttgccccaagtcacaaaaacaagttagtaagttatgaaattagttacatgcatggaatattcatgcttgaatgaaccttaaaagtttatctaacccaaacctcagattttacagatgaagaagctgaggcccagccaggaacagctgaactgtccggagccacaactggcagatggcagagctgggattagattgctagtaacctggctccaacctgcacctctgctctgcctctctgggctggaactagaacccagtgcttctgactttggatttagttctcataccactctcctgtgctgccttgttgaaaatccaagaatccagctgtggggataaggtctatatccatgaaacaactgaaaaccagcatatgatatggagaaaccataagaacaggaaactgccttaccacaagtaaaatgcccagatctcactctttggtaccagttcatagtgttcattgatcagcaattttttttttcagacattgacagcccccaaaacctggtgaccgaccgggtgacagagaatatggccactgtctcctgggacccggtgcgggccaccattgacaggtatgtggtgcgctacacctctgccaaggacggagagaccagggaggttccggtggggaaggagcagagtagcactgtcctgacgggcctgaggccgggtgtggagtacacggtgcacgtgtgggcccagaagggggcccaggagagcaagaaggctgacaccaaggcccagacaggtaaggagcattgttctttgggaatataagagctttcatgctaagtcagtggatgacaagttttgttttccttctctgacattggcagaagtcaatgattaatggaagagtgggatggcatcccttcataacagattgcacacaccatccctcattttcctttaactagtttccttgcaagtcagggccacaaggcagtctccaagctatgattacatggtcatgtccatcaactcctcttctgattgcatggatcttttgctgtagacagtatcgagggtctcttagtgagtttgtgagtgggaacagaaaatgaaaatcaaattttgttaataataatagtatattgaaaatttgactttaagaacgtagatgtcacatctgccatagcaaggagatgtatatcatttgctttatgacaaatgaatcacattataactataaaacatatttataactagaaattatgataagttctatgaaggagatgacatggtgtaggtatagagaataatgaagtagtgatgtttctcagataggaaggggaaatagtaataggatacacatggccaaaacaaccaaataacagttgcttaaacaagaaaggagcgtattcctcttgttgaatagcagagtgtacgttggccagagttttgaggataaggatagctcctacgttatattcttattttagtggaagcgatatctaaccatattttgtacagtgatttaatcagcaaaccagcatgatgagtgaatctatgatatgctagagaatattcaaccagggttttactttttgcggattcctttagtaatatatagtgagcattttccacgtgccctgcccactactaggcactgggaacacaggagaataggatgctgccctcttcctccaggggcttacatttagaagtggcttttagaatcttctagtatgaaatgggaggtctttactgacatgatgtgagacacaaaattgttagttcctggtgagcagagaccatgtcttttccaattctggattctgcacactgtctagaacatttcatggacagagttggggcttgatatacccttactagatgaataaaagatttgttttgctaaagacttggtagaggtaacagcctggattctcaggttctgatctattgtgctttctacttgaggagccaggtatatcttgggggagaagatgatgtccatgaaacagctaaaaatgaaacaagagcatatgaggcggaaaccccacacaacatgaaagggtttcaccccacgcaaaatgaccaccagtttctgcactctggcacctgttcatagtgcatattggtcagcattttttttttcagacattgacagcccccaaaacctggtcactgactgggtgacagagaatacagccactgtctcctgggacccggtgcaggccaccattgacaggtatgtggtgcactacacgtctgccaacggagagaccagggaggttccagtggggaaggagcagagcagcactgtcctgacgggcctgaggccgggcatggagtacacggtgcacgtgtgggcccagaaggggaaccaggagagcaagaaggctgacaccaaggcccagacaggtaatagaagtgaagagaagagcaaacccgggtagtagctgcaggttgatctattgcagctgagtgatgatgcagctgcttttggcatctgtaacctcagggctgcagactgttttaggagagtttgctgtaaaaacaaaacaaaacaaaaacaaaaaacaaacaaagaaacaaaaaactttcattcacccaaagaaagaacaacgtgttataggaaaggcgtcccgatccagacccttagaaagggttcttggatcttgtgcaagaaagagttcagggtgagcccatagagtaaagtgaaagcaagtttattaggaaagtaaaggaataaaagaatggctactagccatgggcagagcagccctgagggcttgtggttgtccatttttatggttatttcttgaagatatgctaaacaagaggtggattattcatacctcccctttttagaccatatagggtgacttcctgacattgccttggcatttgtaaactgtcatggcactggtgggagtgtagtagtgaggatgaccagaggtcactctcattgccatcttcgttttggtgggtcttggccggcttctttactgcaggctgttttaacagcacggtctttatgacctgtatcttgtgctgacctcctatcttatcctgtgacttagaatgccttaaccatctgggaatgcagcccagtaggtttcacccttatttgacccagttcctattcaagatggagtttctctggttcaagcatgtctgacaaaactatagtaatggacccagtgggagcagtcccatgaatgccttttttttcttttttttttttttttgagacagtcttgccctgtcgcccaggctggagtgcagtggcgctatctcggctcactgcaagctccgcctcccgggttcatgccattctcctgcctcagcctcccaagtagctgggattacaagcgcccgccaccatgcccggctaattttgtttttgtatttttagtagagacggggtttcaccgtgttagccaggatggtctcaatctcctgacctcgtgatccgcctaccatggcctcccaaagtgctgggattacaggcatgagccactgcgcctgggcccatgaatgtcttaaaactctttccaaagcctgtgtttttaatcattgtgtctctcagctataggaaataatgtaaaaccaatataaaattcttaaaaccactgattaaaaacctgttttgtggcaagctattttgtataggtttgaccgaatagacgctgtgtgatagaaaggagcaagtattcacctgggtggctggagccctgtttccttgcagtaggcagctgacttttaatgagcatcatctaagtgccaggcctggggaacacagtggtgaacaaaacaaatatctctactctcttgaagtctagagtgaagatagacaataaataagaaaacacatttaaaaccgtaaattatgctaaattctgtgaaggagatgaacatggtgtaggtatagagaattacagggtaaggatgtcttgcagatgggaagggtgagtagtaataggatatacatagacagaaacactcaaataacagttgcatcagcaggaatggagtgtattcctctctgtagaatgtccagggctgatacggtagctcctcgtccaggagacccaggcttcttctgtgattgttgcttagtcatccctagcaatttgccctcctttacctggtcaccaccctgtctgcattgtagccagtgggaagaggcatgatgaaagtcagggcatcactgggacattgcacatatcagcccttctcatgttccattgccaggtcccagacagacctcactgcaaaaaaggctaggaaatgaggtctttagctggatggccctgtgcccagctttactttggttatgctgtcctgaccaacacagcagctgctagctacatgtagctattaaaattatttttatttttattttattttcagagacagggtctcattctgttagctaggctggagtacagtggtatgatcacagttcactgcaggcttgacctcccgggctcaagccatcctcccaccttagcttcccaagtagctgggaccataggcacgtgccactaaacctgtaattttttatttcttttagagatggggtctcactgtgttgaactcctgggctcaagtgatcctcctgcctcggcttcccaaagtgctgggattacaggcatgggtcactatgcccagcctaaattttaattaattaaaaataaaataaaaatattttctcatttggattagccacatttcaaatggtcagtagccacatgtgactaatggctacggtatcggactgtgccgattatagaatactttcatcattgcagagagatctgttggacagtaagtgtgcttacagaagaagggggagaatggattttggcgaaaactagccatttctggcaaagggaagagtatgtgtgatgtcccccagctggaatagtacctgggatggttggagaatgaaaagaggccagttttgctggagcatagagggtggaagagcaagtggcctgagatgaggtgggaggagcaggggcagatcagccaggaccatgtggtacttagaggacaaaatgggctatacttattaatactagaagagtgatatgatgcagtgttcatttaaaaaacattttccaggccacagtgaggagaataaatggagaaaatgacaaggatagaagttgggaggttcgtagggaagctgctagaaaagtctgggtgcaaaatgctgattgtctaggtaagcatgatggcaaaagggacagagaagaggggatgtctggaatatatttttgaggtatggataatacctgttgatagatgtggggtaggaagaaaatgaggactcaagtatgacctgtgttttttatttgagcaacatgggagattggactaccatttcttgagaggggagactgagaaataaaaagtttggggagaaacatcaagacttttaaatatttaagttcaagatacttgtgagattccttggttaattgagtgattcatttattgattacataaatatttattgagtgtctaatacaggccaggcaccgtggtggagatgcagttgtataaactagtcaggggctcagaattaatagatattatggagcgattagcatccagttggtatttaaagccatgggcatgagtgagatcacctaggtggaaaagtacagagaggaaaagagggagctttgggacaggtgcagtgactctcacctgtaatcccagaacttttggaggctgaggtaggtgaattgcttgagctcaggagttcaagaccagcctggtgaaatcctgtctttacaaaaaaaaaaaaaatacaaaaattggctgagtgtggtggcatgcacctgtattcccagctactctggaggctgaggtgggaggattgcttgagcctgggaggtcaaggctgcagtgacctatgatggcaccactgctctccagcttgggtgaaagaccgagactctgtatcaacaaaacaaaacaaaacacaacaaataacagagaaagggagctttgggtgctccagtgtttgaaggttgaagtcatggaagccaagggttgagagtgtttcaagaaggaaggagtggatcagctctgccaaatgccacccagaagcagtgtaaagttgagaatggcaagtatgcattagatgtggcaacacggatgttgttggtgacttagactagcagatttagttgtgtggcatagaaagatgcaaacaggattgattggaagagtgagcagtgaagttaaggtatgtagacattttctcttgagacaatctgtcagtttaaggttgcagagaaatggaatgatacgggagaggatgggggattctagaccttgcttgtctgggactgatgacagagaagaagagaatgatgacacaggagagaaagggcagatctgcagcaaagtccttgagagggtgggaaggcctaaaattcagagcgaagagtcttggctttaacataagatgtcaacaggaacttggcctagaccttccatttccctgggcctccattctcatccccttttataagtcggaaaggttggaggatatgacttcttggctctcaaattctgtgaaacaaaataactagataccagggagatcagaaaagaggttatatccacagcagttttggtggcttatcttgttgctcaggaagttttattgttattttgatgagaattacaaggacagaaattttttatattaaaaagtgggagatgatctgattccttccagttttatatccagtggtttgtttccttggaaatggagaccaggggcctttgactcgtgttttaagtggaattctaccattattaatgataacatgatggagagctcctggtgatgaggtggtaagatgcgatgtcttcctttgttctaaagttcagccttttctaaatctttttaaaaagaaattgacggccccaaaaacctagtgactgactgggtgacggagaatatggccactgtctcctgggacccggttcaggccaccattgacaagtacatggtgcgctacacctctgctgacggagagaccagggaggttctggtggggaaggagcacagcagcactgtcctgatgggcctgagaccaggcatggagtacatggtgcacgtgtgggcccagaagggggcccaggagagcaagaaggctgacaccaaggcccagacaggtactgagagggaccaggccaggggaacacctcacacttaccaggagagaaccttcctccatcagtgggctggggaggggagcaggagggtggttgctttacccgaggacattcttcaaagtggttccttttttacgtctttgagctaattaagttgacacaacagctcagataagatgagagagtatagagggagtgctggtgtcaaaggtggcctccctcacccctccacccggcccagcgctcagaatctccacacttgctatggagaaaatggttgggcctcagctgcagttgggagaagacagaggcaggagcctcttctgtttccatcttccagaatggaggcaatggggatgcatctttctccattccatcctcagttgatgatgaaaggtgcctgaattgcatgtattttgtgtgtgtgatggggcctctgatcttggcagagcatcactgaggtcagaacccagaggcacttggaagagagcactgtgcccaccctgaggtctatgagcctcttctggcagtacgggcaaggtctgtccattccatccatggctgagctcaccaagtgttgccacgggacctagagatggcttgaatttctctatggtttttattagttaaaattagcttgcatttttaatctaaaaagtaatatatgcttatagtaaatattttcaaactaaatagagacgtgttaaaacaaaacaaaacaaaacaaaaacggccaggcgcggtggctcatgcctgtaatcccagccctttgggaggtcgaggctggtggatcacctgaggtcaggagtttgagaccagcctgaccaacatggagaaaccccgtctctactaaaaatacaaaaattagctgggtgtggtggcaggtgcctgtaatcccagctacttgggaggctgagacaggagaattgcttgaacccaggaggaggaggttgcagtgagccaagattgcgccattgcactccagcctgggcaacaaagagcgagactccatctcaaaagcaaacaaacaaacaaacaaacaaacaaactcctctctctgtcctggactccctagtatgcagggttgctctccagatgcaaccagtagccagttctcccttcttccctctttcccacttcctacctccttctccccttcctttctctgttcctttctctcttattcctttcttctcctcttccttgtttatcttctcttggattcaccttctccatttttgaagacagcaataaaaagattctcattttcctgcttcatagaaatgtgaaagtaactaagacagacatctcaagtccataaccagggagtggtgggcagtcaaagaggtggcaggagattgcttaagatgttaaaatagccacagttttgccttgattgtgaaatcaggaaattcagtttttctgtgagacgaatagaataaaatccatgccagatgttatgctttagaaaatcaaaccaagttgatattacagaaactcaaaatttgtcaaaacatcctaattcaaaacaacagctgtctgatttctattaaaatactgcaattcagctctcagctgaaatgctactgggtagaaaatagcctggagacgtctttttgggaagttataaattaaaataaccttctatgataatgctttttcaaaagagaaatttccattcatatcttctttggttaaaaaaaaaaagagccttctgaccagtgatgttgaccagtatttttgctgagcttctgttttcctggtctacagtgcacacttgcttacccacgcgttccctctagtgtttgggtgaggaagtacatagaagaagagctctgcttttcctatatcccttctctttccctcttccctcccccacctcttcctttcttctcttttccttccttctctctctctccctctttctttctctttctttctttctctctctctctccctttctctcttcttttctctctctccttccttccttccttctctccctccctccctcctctctttctctcttttttctctttctttctttctttctttctttctttctttctttctttctttctttctttctctctctctccctccctttctctcttcttttctctctctccttccttccttccctccctccctcctttctttctttcttttttctttttctttctttcttttttctttttctttctttcttttctttttttctttctttctctctcccgctctctctctcttctctttctttctttctctcgcttctctccctttctttctttccttctctctctctctctctctcctctatacaagcacctgttcccttgccttctccttctcttctttctctactgggtatgcatctaaggccacacacttcaatatgtaacagtatgtaagaaacataactttttgtttctttcttttttttttttttttttaagacagagtcttgctctgtcacccaggctggagtgcagtggcgtgatcttggcttactgcaacctccgcctcccgagttcaagcaattctcctgcctcagcctcccgagtagctgggatgacaggcgaccaccaccacacccggctaatttttgtatgtttggtagagataggatttcatcatattggccaggctggtgtcgaactattgaccttgtgatccgcctgccttggcctcccgaagtgctgggattacaggcatgagccaccgtgcctggccaactttttgtttctatgccaacttaatttcaatcataagcccatattctacttagggtaagctccttcctcagggctgtatgtaagtcttgggtagtttcccagtgacaggcattggggcccatccagcatttcaggcaactttccaggcgggccaagtcaccctggtttctttgtgcatggccctttcagatctgtggccctcttatctttccacatccttttgggagccctgccatctctgaggatctatctgccaatctaggctgttaatatccaccactttgtgggaacctgcctgggaaatgggggcccagattcctttcctctgggacccacccaacgccctgttcttcttgtctctaatgggtctgtacttgtagaaacaaaggtcagaaaggtcctgtggcagggaggaagagagcctgcaaactgcttgaaagaaggaggagaaatgggagggtttgaaaaggggaaaatataaactgatgtctcaaaaattaccttgcctcagttgtatcttagtaataacaattacctgactttctacgtacagaactcgaccctcccagaaaccttcgtccatctgctgtaacgcagtctggtggcatattgacctggacgcccccctctgctcagatccacggctacattctgacttaccagttcccagatggcacagttaaggtacggggattccttgtcttttctcctggtgccttctcttctgtgtgaagcaactaacttgggccaatcagctcatttgctggcctcacggcaacttgctgatctttactgatcacattgctggttgtacatctgccccgggttattttgtttattgttagtcttccccaataaatgtaagctctatgtttgtctgtttcatttatcaccatatctaaagtgcataggacagtgcttagcacatggtaggtgttcgatatatatttattgaacaaattgattaacccttatttcaagggttatacctccccttagaatctgaaggccagcaaattttcaaaacctgtcccaatggaaaattattattctccctccttgccaatgaagaaagaagggaggaaataaaaacaggaaggacacttaggtttatgtgttaccttaattagtgcttatgacagcacagctaggaaggttagccctatgtttatagaggaagtaagactggttcagaaggaagtttattgaaatatcaactatctccttgtctcagatatcagtggccagtttcacctcccctattaatttctccttagcgcggcattgccagcctgttcctgctggcaatgtagccactatagttagagcccctgtgtgtatctgaaggccaaagtctcccagaaacttggccggtgatcctgaagctgcagtcctgggtgctggttctcagctgatgctcccagtagtgctgactctccatggcatggctctccagagaagtggctgggacccactgcgattctgggctgccactgaggcttcggagagacaaaacactgtgctctcagagagcttctgtcattagcaccagggaacgctgttgacacctagggtgctagtgggtgataaactgagtcactggctgtctaatctctcccttgtttggtaggagatgcagctgggacgggaagaccagaggtttgcgttgcaaggccttgagcaaggcgccacctaccctgtctcccttgttgcctttaagggtggtcgccggagcagaaatgtatccaccaccctctccacaggtaatatggaatcctgtactctgaacgaccatgcaatgagaaccagcatcggaaagcctagcaaaggagtccagggaggagcaagtggatgcagaactattgatttctctaggcatggggaagtggaaatggggttgtgtgttcaaaagaaatccaccccacagtggggaggctaaagagaggagtgaaatagagtgttactttgtgagggagctgagttgggggaggaagtgatgtgaacttgaccttttcctggtgcatttggggagttgatgagaaaaataagatatgagtgaagagttggaagaagctgaagtaggaagttatgaaataatttccaaacaaaataaattgccttaaaataggaagaaactccacctctttcctccttgcccttgtcctaacaacactctctctgcttggctcccagttggtgcccgtttcccacacccttcggactgcagtcaggttcagcagaacagcaatgccgccagtggtctgtacaccatctacctgcatggcgatgccagccggcccctgcaggtgtactgtgacatggaaacggacggaggtggctggattgtgagtcacgcagaaccctggggagctctgtgtagggccttccttctcagcccaggatgccggtcatggatgctccatagagtgtttggagccctatttcttctccactcatggaagagaggagttttggtggcttgtagctgtttttagagagatcccaatgttacaggaaaggggtccccatccagatcccaagagaaggttcttggatctcatgtaagaaagaattcagggtgagtccacaatgcaaagcaaaagcaagtttattaagaaagtaaagtggtgaaagtacagctactccatagacagagtagggcgtttctgaaagtaaggaggaatgcatgcaccctatgtacaagacttgtttatatataggataaaaaaagatcatgaggggatgtgctctattacaatggttcgtgataaaggattaattttcttaattactatattttgcgagaatcaatattattatatttaaagcaacattaggagtgcttctgttctcaagatatcaggacattcctaagtctgggtctgtttagtaaacactgtcaatctgttcccttaaccataaacatctggaggctaggaatacctaactttctgggaatgcagcccagcaagtcccagcctcattgtcttagcactcactcaagatggctctggttcaaatgcctctgacaccaatcaactgtaaggatagagcctagtacttaaccactgtcctagaacaggcttggttagactaaggctgatgactatgaaggcttgtgagttgatcatcatctagtaatgccttatatgtatgtattacctatattttaccttcttcaaagcacttctgtacacatgaccctcacacaacagctttagagtaagtgagagaggattgtttttcttattttacagatagggacagtgagtcccacagaaagaagtgcctggcctaagtcatacaagaatgacaaagctgggaccagatttcaaaactccagcctcctaatcattggtcttctcagtgagttcatctcaggtcatccaagatgcgaatgcatagcctgactggggagttcagacctctgaactggagtccattgtccaagttctgtaccctgtctccacagtacagcaacaaggcctttgaggttttgattggaaagactaaagtctgaaagacggaaacttgggcaatgctctaattgtccctcttctgtgtagatgttttattctcttgggccattgtctgcctaaaccacatggcagcttctttgattgcatcagcctgatccaattatatgataagctgtttttgagggttgcaatctgatccttccatctccccttgccccttttctccctgtgcctgaatgataaagactctcactgctccaagccagcatgcagccttaacctgctgtgcatccgcaactcactgtgggaaagagagagcatgatctcatagtgctcaaaccttattcatttacacattcactcaggggcctgggaaaccaaagacacttgagcagccatgaataaaaagataccatctgatgagcagcaatgaagaaaacttattatctgcacagcgacatctgacggttgaaaggcagtaattggattggctgggggaaattcccgattgatttataaaaacaacagagcagaatgtaacatgggaggtcttccacttgaccagacccatagggctgtacctgctgcttttcatcagcaccattgtaaggctaagcattctgtcccttcaggcctgcagcccaatttcctgcctttgtgcctgtaattgacttttggcaggacgtttgtattgtctagtgtggcctttttgtaagccaagctcccacacagaaggagttatctggggcaacatttagaaagagatctgtcagtctgtctgccctggaatagtcatgacttattgcacatatatttattgagtgcctactatgtgtcggcactgcttcatgtactcaagatccagcagtgaaccaaaccaacagaaatccctgcccccaaggagcttgccatttacatcctgctcatgcaaatgacccctcctcaaacacagagatcggttccaaaaataataaaaccactgtgcattctcaccctccccagccccaaccccaccccaagtcttgttttctgagccagactcctgggggtcatgcatgaactgaggttctgcagggttttacttaaagccaccatgctccagaaaacatggagtcctgaaaacttccccacaaaacattttactgacagttgttacagtttttttgggggggttcaagagtcctttgtcactgaaggatgacccatggtctgtttctctgttttattgagctttcaaaatccttttatggtaattcttccatcccaagcaacaggaactcaatctgaagaataggccagaagaactgtgccctgaggtaaactctgccgctggtgggaggctggaaagaacatcagggaacacttaatgtttcaaatatttccatctttgttttccatcttgaaagtcttaatgcattagaggctctttccacagacatttcaatgcaagtttgactttttttctctgtatttagtcattcagggcattgagtaagttctagaatgcaatgacaactctagtatagaaccagacacaaagaggtttcttttgtttgtttgtttttctccctttgaaacttatttggtaagggggttttgtgatacccaaatagttcattatagggtgttttcatctcatagaatgggagtggattagactctgagtgagtcaattaaggctgcctgatcaagatgtataaatgatccctgtgggtcagttcatttggaaactgatataataaaatgcaaactaacatttattgagagatcataataacttattatatctatatatgccagggtctggcttaactactttatgatttactatgattaatgatcttgccgaagccttgatttaagatcgtgacggagaggctgttaacatcttaatctaacagtttagaaaagtgaggcttgtcaaggttgcccaaagacacaactagtaagtatagaactggttctggttcaaaacagtgatgcaaagagcaccagaatcatttttggaagcttccctggcccagatgaagtattattacacacacacacacacacacacacacacacacacacacacacatcgctggaaagctcctatcaagcttgggcactgggttcactgataggagatagagaccaaatacctttgtaatgcattctaggggggcagggttggatttgagcctgaccttgtggtgggaacgtgatttgacgcgatgtacgtggagccatacatcggtgctacatgtatcctaaaattccactgtccttggtacaacaagagtcccaaggaaggggttggaccaggcaccttgctaggaaattagcaagttctcagagtctttgaaaattcgatttgggaaacagattcagtagggctggtattttcaaactttctgacagaaagataagatttatgcgtggtctttgtatcagtgattagctgtaggactctggatactcgcttttctggactttcacatctgtcaaatggcatcataaatacttgctccagggccagcactcacgaaatgattgtcgtctaagtgaataaatgagtgaagaaaagtgagggaagccaagaaggaaatagggcatttttaaaagatggatacttgagcaaaggggaaagagaacaacaatgttaatgtggtgttagctgtttgccgtgatatttcctacattctgttcagtagctcttgcctatttatagaacatttttatgtggtgtctcatttagtcctcccagaagtcttatgaagtaggctcttctcttcccttccattcctgttttaccatgagctggctgagggtcagcaatagaagaggctgcctcagcaatccccacccatcccctgcccaggaagtggctgtggtctgacttggagtctggagccttctgcatccatggtgccccactccttggccagcagacatgaatgggtgctttggaaggagttaaatatgcactcccatgtggagctttcagcattgctgcagggtaacctactctctcttcccggagaaaaatataaagaaggcacaaatatcaggtggtttaccttataaattcaagataatgtgttttacttcaaggcacatgctgtgaagtctagtggaaaggagggagattagattttgtgttggggcttctgcatctgaatgaatgcaaagaaaaataggcagagagagaaatgcaattctagcctttggttagtgggaatcgttcctgaggttagctaggatggcattcagcttggctctcaaggtcatgtggaattagatgtattatcaattccaatagtgtatacaggtgtgtgtgggtacttttcagatttacttcctataaaagaatccaatttactgtgactggaactgccttccttctccaaacagaggaatttttgaaaagaaggcagtccacactttggtgaatggcacccaactctgcctccattttcttgcttctcactcattctttggcccgttccagtttggcttctgtccatatctcacactgacacagcccttgctaaaatcaccagtgatttctgtgccactaaattctagggatggttttggcctcctgttccttgagctctcatcagtacttgacactattgaccacacctttctctttgtggcttttgtgattccatatttttctagtttctttttctccacttctgttgccccttctctctccttaatggattcgtccttcttcattatacatattggatgtcctcaaggcttgattctaggccactttatcttttcagttcccattttcttcctacgtgatctcagcttttcccatgacttcattttaccctcctctgggtcccatgcttctctgtactaattaggatagaatgggctccaaattccagcgactgaacaaacacagtgtatttttcttatatgtgcaatgtgttgtgcaggtttggcagccagatataagtgtgactcagggattcaggctgtttccatcttgtagttctgctgtttcagtgtgtggcctttcccatggccccatggtgcatggcagtagaagagagagtgtggagaacccacccacacacaaaaggctcccacctacagccttttggctgcaaacagtcacatggctccaacttaaatgcaagggaagctgtaaatggacatcctcctcctgtgttcctgggaagaggaaagtgaactgggactcagtgaactcctagcattgcctgagacacactctaccttaataagtctagcatagacctctctttagaactccagcccttacatccaattgctctgtggtattttcattcactagcacacctcagaaataactcacacttaaccacatccccaaatgagctcatgacccattcataaaacctgtacttggccaggcgcagtggctcacacctgcactttgggaggctgaggtgggtggatcacgaagtcaggagttcaagaccagtctggccaatatggtgaaaccccgtctctactgaaaatacaaaaattagccgggcatggtggtgtgtgcctgtaatcccagctacttcggaggctgaggcaggagagtcgcttgaacccgggagacggaggttgcagtaagccaagatcacaccactgcactccagcctgggcaacagagtgagactccatctcaaaaaaaaaaaacaaacaacaacaacaacaaaaataaataaataacaataaactaccacctgtcctctctgaatcccccatctcagtgaatagctgagagaagagtcatctgcaagcccatactataagaaacttatcttaccttgacttcctcctctttcagttccacattctgtcaccacctctgtcaactttaccttctatgcacttccatctattctcagggcattcctcatccaagctactgtcccccttcatctgcactctacagtggtctcctaattggtcatctcacttccactcttgcccctgaccagtccattccatacactacaagctagagacgaatctgattggatctcatttcctgcttaaaactctgcaataatttccagcgctcttacctggaccaacgtcttcaacaatcccttttaaaggctcaccaggactgactcttgccatcttctcagcctccctttccatcccttcctcagcccccagaagccccaacattcacccccgtgctcttgcctgaccactcctactcatcctgcagctcagccatgtcctgggggtggtttcttggctccttggtcaggtcctcctgttttatgctcttacagttctgttgcatctttccctcatagcccttatcacagttttaactgcatttaaaaattatttaatttagtaattttatttactgaactattagttccaggagggcagggactatttctgatttattcactttgcacactatcttgcatattgcctagtacatagtagatgctcagtaaatatttgttgtgtgaacttttttctccataagtattaaataatcgctatattaagaatcaggtgaattaaaaaataattcctaccctcaaactatttcagaaaaggggaaaaaagatgccataaacatgatgtgccccaattgagttgaatgggtgttgaaagttacatgtgagagttagcagaggtctggaatatcttgccctagacaacccacactagcaactgaatcacacaactaacggaaagaattgaaatttcttgagggcaggaaccttctctgcttttgctctacatgtcttagtacctggcatactactgtacatataaagaatgcttattaatatagtgaatctactgacatataaataaaaagcctctctagaatgaaaggcttgctagctggaggaaggcagtgtatgagcaagctcttggtcttctcttgtctcccagcacctatgtctgtttggagggtcagagtgaagtattcatcttccttctcaggtcttccagaggcggaacactgggcagctggatttcttcaagcgatggaggagctatgtggaaggctttggggaccccatgaaggagttctggcttggtatgatctcagaatccaggaggctggggctgtggggggtgatttctcccaggacaagctagctaggaggcttagggaagctcaccaccttcacagagaggccccagtggcagggagacagaggactgtgccgagcagggtgttggtgggcatgttgatgggaaggctgtcttgcactctgaacttgttgaaaggtagggtggtcacaggggttttatgctgatttaagctctgcaggatctgcctgcagcctgaagatcttagaagccacagtagtagaaaaaaagttcagtgattgggatgctggtccattactgggaggtcactctagcagtctctaaaattctgttcgtgatgccaggcattatgagcaattttttcccccttttccctctgctctcctctggagcagatgttcacagacagtgaaatagccaaaagcatgaattgggaaatgaagaattaaaaagtcatagttcagatacccagtgtctaataaagtagatgatgtttgtggtttgctcagtgtaaaatctctttggggatcttaggatgagtcgttgacctgctctcctacttggtgagataaatggatgataaatacaactgcttctgttttagaaggatggagccaatggaggcagattccttctggggttaccctgcccccttcactgctcccttccatagaatgtggtcttcgcactccttagtgtgactatgagcccccaaaagagaaagtgctgagactgccccttattagcagagaaggtaaagactaaagtgactttaggttctgaaaacctcagacacacatgttgagtgcttactcgcacacatgggttgattgattattggaattccattttttatttttaggacttgacaagctacacaacctcaccaccggcactccagcgcggtatgaggtgagagtggatttacagactgccaatgaatctgcctatgctatatatgatttcttccaagtggcctccagcaaggagcggtataagctgacagttgggaaatacagaggcacggcaggtgagaaaaaatgttttcttactgcgaaggtctcttgctgtctgttgtgtaaggattggtttgccgtgtgccactgatctgggggatggaatattattctgtggaggtgaattgttctcattgacagtggaggtcctactctctgcagggggtcaggagtgaacaaatagttgaagcaatccttgaccaccataaaattggaattttgtatgttatatgtcatccccccaccccaataaaaaccctccccttgtactcctcttattcaggctgttgtacattagctgatgagcccatattctgaacaatttcttgatgcttgtcagtctttcattcggctttagcagtgtggctgtcatctttgtctgcacagtagtgtgtgtgtgtgtgtgtgtgtgtgtgtgtgtgtgtgattgagcttttggtggcactttgctataaaaacagaataaggaaagtgctgattcaaataataagaagtataggtctcattaatttaattcaactgtgacaacacagaaatgagcagttcagtggaaagtgaaggaacctttagcctctagtagctgctcattggagctaagccagttgctggtgtgtttggttgtgagggaaaagagcaaaattaagcaacatgactgaaatgctggaatgataccagtaaattaaatacattatgtaagagggggaggtgtggtcattgttttaataccaatattttaaaagcggtatttatggcttttaaaccataacaagtgttttgacatttgcctgtgttttgacatttgcgtttttgactttggtgtatttacacaggaatgtgttaccagccagactgaccgactgtataagacatggcggtctctctccttagacttaaatgtaaataggtgaatacaaatagaaggtaacttttgcagagagtcaaataaggggtgagaaacataaacagttacaggagtgtggagaaggtgggcacatggagtacgaagcaactggagggagctggatctgcaaaaaggggcaaactcaagtgggaggaaatagagggctctccaggcctgggggctttagggtgagtagggactgagcagaggcaagaatgctggagtttatctcacagccttgctggacttctcaagaccatgtactcaaggacccctgatggcagaagactgtgaacagaacttctgagtgtctggggccatgatctgggtggccaactatgaatgcaaaccttctttgagatcttataatttcatttaaaaaatagtcacatgaattttgcatttgttcttgtttcccagtgcctatctcagagcctggtacagagtaggagagtttaaaaaatgaaattgctagcaggacttttctatatacataatcttagggatgtttagtatcttacattatagtccctgagacccaaataagttccataggggtgaatgaaaggtgagtttggtgacatggtgacatgggaggggacaaagagggaggggtaggcacctaccagagtatgaggcatttgggctacagacacggggaaactgttccaggattctgagtaggagttgggtgagaaaaagtatgcaaagaattatttcagggaaaagacaatccttgaaaaaaaagcattgcagctagaagatcctcactgcctttggatactgtcacttctttcctaagtagtcctgggtctccatgggctgaagacaggctgtgctacatgtacttgaagtataacatagtcatgcattgcttaacgacagggatacattctgagaactgcattgttaagcatttcatcattgtgcaaacatcatagaatgcacttacacaaatctagatggcagagcctgctatagaccaaggtatatggtgtagcctattgctactaggctacaaacctgtatggcatgttactaaatattgtaggcaattgtaacaccatggtaagtacttatggatctaaatatatgtaaacatagaaaaggcacagtgagaatatggtataaaagataaaaaatggccaatctgtaagggtacttactatgaatggagcttgcaggactggaagttgctctgggtgagtcagtgagtggtgagcgaatgtgaaggcccaggacaggactgtgcactcctgtagactttaggcacactgcccttcggccacactaaatttatttaaaaatgttctttcttcgttaataaaaattaaccttatcttattgtaactgttttactttataaactttaacatctttttcaatttttttgactcctttggagtaacacttcgcttaaaacataagcacattgtgcagctgtacaaacatattttctttctttatatccatattctgtaagtttttttttctatttaaacattttttatttttattttttactttttaaacctttgtgttaaaaactaagacacaaatacacacattagcctaggcctgcacagggtcaggatcatcaatatcactgtcttccacctcctcatcttgtcccgctggaaggtcttcaggagcaatagcacacatggagctgtcatctcctgtgataacaatgccttcttcttgaatacgtcccaaaggacctgcctgaggctgttttacaggattttttttttgtaaagtactcatacactctaaaatagcaataaaaagcatagtattattcacacaaaccagtaacataattgtttattatcattatcaagtattatttactgtatgtaattgtatgtgcaagacttttgtataactggtaggtttgtttacaccaaatcaccacaaacacatgagtgatgcattggtctgcaaccttacgacagctgtgatgtcactaggtaattttcaggtttattgtgatcttatgagaccactgtcgtatatgcagtcccttgttaactgaaatgttcttatgcagggcatgactgtataaaacatgaaagtcagatatagaaaaaggcagttataatacagttgggaaacatagatggacattcatatgattatgaggatattaactgaataagaggggatttaaagatgctattttgtgtgactaagcacactgtccatatcctcccaccccatctctaaatgagatcagactatgttcctgacagcttattccaggttcttccaaccctttggtataatacagtacacacattccagtctgtcccagagcccttgggcctcttcagtccacatggagtccatctgatcatttctttggtttccagtaccctgttgtctgctcttgatcatggccatcggttagcctcagcctttccttctcaggttaaagaagtctacataagctccatgcgtgggaccctccctggacacaatatgaagtgggtgtttttctttggcccgtgtgccccacatctctccctgaaacccagtgccctccctggcctcctggtcaggaacctcactcaggcctgtcctcccgggctgcacatttcctttcccttggccattaccatttgccttttctgaagcctgtgttaaagtgatccagcaaatgaactgatgccaatgggaaagagactgaaagggagtcaacatgtttggtgagttatttaattctcctcccaggtactctgtttgcatgttaactgcaatgaggggataattcctgttctaaggttgttcaggccaacagtgccagcaagtagaggatgtattttttaatagaattattttttaataggagactttcacacagcatttaggcagcgatctagtcttcccatgtgtactatcattcccgcttttaaattctgaattacaatggtagggttagtggagttttagcgttccttatgtacactgatttgtccatgaggagggtttcagaatttagaaagctcctggctactcatgtcttgaatgctgaggcactgtttagaggacacggcattcaaatggaaggtgaatattttgatacctccctgcacgcaccagctctccccagcctctatcttcattttagctctgattagaactggcatgcatgcagcctggcaggaatgtgtggcttaaggcttgctccccactcagactgtccaggtgggccctcaacttttgacttccactcaagttatatcagaaagtccattttcccttcatgaagcaaattccagcaaggtaatgatgtgtaaatttagtttctgattctgagtcttctagtgggggcagggaggctatcttatgagctccaccattaagatgttattcatctatttagagatcataatgcaaacataaagagctaggcattcagaatggtgcagaatgaattctagggctaaccaatgatttacagctgatttcgagtcccacctgcatgggccacagtggggacacaaccagggatggatcccaacctgggggcatttggaaatgtgactggggagctctggaagcatttagtgggttgggaccagggatggatttttaaatgctggcacctgaaaaagaaaaaaaaaattaatgggtacctggatgaaagggagagctagaaatggcacaaatcatttgtaatcatccattcctaatcctgaaataaaagacattcaaggttctgacacacactactgtgtctgtgtgtgactgacaggggatgcgatgttaatggcttctcctgatctttgaaggttcagctgcctgggccatctttcccaacctggtgaatcctagagggggagagtgggcctcagagggacattttgatgagatggatggtgaccaacttgatcccctctgagtttgggcacagacctttcatgggcctgccatgaacccctccagtcctcattctcactctctacactctgaacattaggatggcttcagtttctagaaggtagaaaatccttctgcagaaaaagacctcccacatttgggtgaaaacctgctttacctttctttatcccagtgcccaggtttagatcatcacaaacatgtctttaagagagcctctgcacagattcttagaaagcagccctgggaaccttctatgtaaattagctaagctgtgctcatttaaagaaggttactaagggagacactgcacgttatttcaagctgtggttaactttctgtacaaagtctagagggaggcggaaatgtgtatgactagcatgacaatatacctttcttggattggagaaaactactggagacagacctgtctgctgtgtttgcgtggaagtggcctccgtggccccagaatcctcctgctttttctgggtgaggcataaacgagctgctggtgagattgcagacttggagggggcaaattaggaccttcccttttaacatatgctaccaactctgcatattcaccccacccactccaaaaacgtttttgagagcaaggaccttcttatttttgtgttcacagagccaagcatgtgctgctccatagcaggtattcagtaaatgttccctaaaaaacaaataagtgaagttgtagaccagaggttctcacactgtagcctgcgtcagatcatcggaagggcttgtcaaggcataggttgccggggcccaacctgtagtttccggttctgtaggtctgggctggggccaaataatttgcatttcttttttcttttctttttttttttgagatggagactcactctgtcacccaggctggagtgcagtggcacgatcttggctcactgcaacctccacctcccggattcaagcaattcttctgcctcagcctccagagtagctgggactacaggtgtgcaccaccatgccaggctaatttttgtattttcagtagagacggcgtttcactatattggccaggctggtcttgaactcctgacctcatgatctgcctgcctcggcctctcaaagtgctgggattacaggtgtgagccaccgtgcctggcccatttgcatttctaacaagttctcaggggatgtggatgctgctggtctgggaaccccacttgaagagccattgatagatagctctctcttgctagcgtgcaagaagccccccattgaaacaaggaaggcataggtggattggtgtctcagaaagaaccctggacttggaatctcaggacagagatttgagtcccagctctgctgtttgtggacggtgggaccttaagaagttcctagagtctaacctttttgaatttgtttccccacgggactaagagctgccctgctcacttcacagggttgctgtgagagtgagatgagaatgcacatgcgaagaagatcgctaaacttagagctgagatataaatgtaagaatctttattgcaggaacagagcttgatgaagcttgtgattgatatgggcccttattgccttttatgagcagaaaaagaaagcttgtaaaaggatgaaaaatatgatagggaaacaggagatacataagcaaaataattaaagcagttttccagatgggatgtaatgaaggactgaattttacatgtgtctccagaagggctctggaagttcaggagtgtttgtgtgtaggtgtgtgtgtgtgtgtgtgtgtgtgttaggagggtgcatgggaagaccaataaagagaatcttctttagaagtggccttgagctaggctttgaagggatggttgggatttggacagatgagggcagagagaaatctcctggaaggtgggctggtccacagtggagggtgtgtggtggagatggtgggatgcaagactgtgcatagggcacaaccaacctacaggcctgcaaggcatggaagaggaattcacctccacgtggtatgaagtagactgttaggcctgagatgatgaaaatggacgtctaaactccagaggggctggcaggcaagaagccagagagaaggctgttttgttaacacagacccaggatgagagaaggccgagggtggctgtcatgggagcagagacataggggtgtatgtgagtgacctgcagagggagggcttgagaagaggtatgaagggattgccaaacatggctccaggttccaggtctgggtggtgtggagaagggtggacccaaggcagagtggggagagtggagagtggtgctcttgtgtgtggtgtggtcagggacttggggagagttgttatgtttggatatttgatctgactgtggagcttccaagtgaaaatgctatgagaactgttggagaaacaggcctgaagttggggtacaggccaggaaagacagcttgttcccatgtgtcatgttcccatttgggctgttttgagagagcggtgactacctgtgacatgactggctgcatctttggcattttcatgcctagagatcttcctgctgggtcctcttttgatcatctcctcggtggctaaccctgggctctcgcctccgtctcttctctcctgcaggggatgctcttacttaccacaatggatggaagtttacaacttttgacagagacaacgatatcgcactcagcaactgtgccctgacacatcatggtggctggtggtataagaactgccacttggccaaccctaatggcagatatggggagaccaagcacagtgaggtaggtgacaggtgaatgtcttttctgtcccagggtatgtccatattcagcttccaaatggacaccctccaggccagtctggcagcccctctccttctgaagcttccagtcaaagcagtagagcttctcctccaggctccatggccttgaggtcgtggcctcccttcctgatggccatggccctgcttgttttgcattcccagagctgcacacttgcctaggggaaggtgcgggaaaagcttgggctgcccactgccatgtaatgacagatgatgtgctctgcacgctgtctcattttactagttcacacactgtcagctctagctgctgtaacaaaataacacagaccaggtggctcaaacaacagacatttatttctcacagttctggaggctgggaagtccaagatcagactgctggcagatttggttcttggtggtggaccttgctggcttgtggctgtgcgtcctcacatggcggacagaaaggagctctgatctcttcttcatataggggcatatgtcccatcatgagggctccacctcatggtctcatgtaaacctaattaccttccagaggccccctctacataccatcatgttggtggggggtggttagggctttactacatgaattttgaagagacacaaacattcagtttataacaaacactgcctactttctagttgttctcctagttgaacaagagctatttctttaggctgagcatggtggttcatgcctgtaatcccagcactctgggaggctgaggtgagctgattgctcatgcccaggaatttgagaccagcctgggtaacatcgtgaaaccctgtctctacaaaagatacaaaaattagctgggcattatggcgtgcacttgtagtccctgcctctagggaagctgaggcaggaagatcacttgagcctgggaggttgagactgcagtgagccatgatcaagccactgcactccagcctgggtggcagagaaagaccctgtctcaaaaaaaaaaaaaaaaaaaaaaaaaaaaagctgtctcaagtcctttgatcaccaggaaaacagtcttttgtgccttaggtcagacctactcttggatccacttcacccaaaaccttcccagaacattgagctagaccagtctctccacattgggagtgtgcgcccagggcccaggggtccaggagggctcctcttcccacattgccctgaaactgtcccacccgctatttctcaagcctcctctgccccagtgcatcatcctgactctttgacagctgcggggcacttcccacctgctccctcacagtttcttgaaaattgcatctttgtctctgctcgtcattaatcctctcccctccacaaaccctgagtccccatcctaggtttctaatttcccatctgcagccctgatcctaagcctccaggaagccacctcttcagaactcaccttgtaccaatattactgtaaatattagcacatccgaagtccaggtacattttgattactttggccctgaccagtcttcgggactcccaatctttatgtgatttttcaaagggaagaagaaatttgcccccagggaagctggggagggtgggcccatgaatcatggtggcagcgtgtgggctgactcagggaagccagggataggagatcaaatattggaaacgagcagccaggatgccctgaaccatcccatatttgctaataaaagacattcatctgtttaatgcgcttttcacagtctgcaaggcatttagcttcttgtttattatttacctcacaaattaaaatacataaaattggtcacttgggctttttattggccaggttgcagggttattaagtgaattaaatattattgcgctcaccagtcaaaagaaataaaatgaaatttagttttcagcaggctatttgttaccccagagctaatatctaaacagtctaaattgaaaatgattttacacaactggccaattaatatgtttatttttgcctttaattttttggaaaggaaaagagtgaaggaaagataatttgcccattgccggcccggttgacccctgtgttgtctctgtggctgctctggcctcacccagctcccgggctcacacccccttgctcccaccatagagaccgccagcttccaaatcgtccaagtcctctcagcccgtctaaccccagctgcccagcagagggcgcgtgtgtccggatcctgccctcccctcccttctcatcaccccgtctctttctctctcctgagcagagagggagtggtttcactggtaattaattaattaattaattcctttgtaccataacccaccctgccctcctcctaagagcctcttcttgatgtggcttttttttttttttttggtagggggtgaactgggagccttggaaaggacatgaattctccattccttacgtggagttgaaaatccgccctcatggctacagcagggagcctgtcctgggcagaaagaagcggacgctgagaggaaggctgcgaacgttctgatggcccgtgtgagcagtcctcgcaggagacaccaccagctgtgggagcttggggcggggtgggtagtggtcactgcggtctgggagtgctcagatagcccgcagaacaaatcatgtcaccaagcttcaagccatggaggttccttccctctcacctgcatttttgcccgtctttatgagggtcttgaaaatcaaaatagtagttgcacagtatgtgtaggaaagacagtactggaacggcaaggtttctcagcttatcttcagcaacatatatactggattagggcaagagaaggaatcacccagcacttcaccagttggaaatctctggaaatttacatctatgtatttaaagttctgctaatgcaaatcttttctctggaaagaagcacagaggaggagttctgatgacccaggggttagggctgagacaaccggacgtttgtcacctcctttcccattgggtttttaggaaaacagtgtgaacctcccccttttaatttctggtgttatgaggaagaataaaggggataaaaggggctaagatggactcatgtttagctaagttctgacttgtatccagcatgctggagaccaaagctgccgccttactgctatttttaagtgccctcttttcagtcatttgcataattgcgtccatagagctgcatatgttgtgaataaattctcactcatttcaactttgaataatttgactgtcttgataattggttcctcccaaagactcttctgcaactcccattcatgcccaccaggcctcagactccctcttttccccgccctgcactattggagccctgggttttgtgggagtgctcagcaccgtgagtcttactgtttgatcggacagttagcaagatcagatcctttttgcttattttctatcactttggagggttttctgtagcaaaatcagtgaccaatgaagtaacttaaattcctattgaagaaaaaaaataataaaccacttgatttaaaaaaaaattgccatgtgttattttcctccacgtaagtgcacttgaattctaaatttaacctacatgcaagtgaaggtacaattcgtgcattgtaatggaatttggttggctgtggactctgatttgcatgatgggaaataatggtatttagaatgcagaagtgagtgaatgggaagtaaggcgaatgctccaaaagctgccgtacccctccaggacgagggtgtagtctattgcctagatgtctccaggttttaacctctgggtgaatgtcaaaccatacccctgaaaccgtttctgtcaacctttaaagtcttcagcatccccctctggtgccttccttccccagacacacacattgagcaatgccatggtaactgctcgctctgataatgagtggtctcagtgaaatacagttttagtgttgatgctgacgatgaaaaaatgtgcttgcatgttattaattgattcaacaagagtttgttgtttgctttgtatcaagcagtgtgctgggcactggggaaacaaaggtgagcaagatagacactatccttgtattgatggagcttgtgtgctgtcattcattcattcgtttacattcactcattcaacgaatagagatgaagccctattatgtgccaagttccattctaagcattggtgttaatcaaggacataacatcatattcctgtccttgtgctaatattctcatggtggaggctgacattaagcaacaaataaatgtgtggttacaagaagtgggaaatgccgtggaagaaaaggtaggatgagaagatgaaggtgttgcatggtgttggactatgaagcctctctgaggaggagatgtttacagaaattgaccaaatttctcctagtcttgatctaactttatcagggcctgagcctgagctaatttctttgtctgcctttttttttttttttgaatggggtctctctctgtcttgcaggctgctgtatattcacatgatcaaggctcactgcagacttgaactccagccttgaactcctgggctccagcaatccttccgcctcagcctcctgagtagctgggactacaggcacatgctactgtgcccagctaattttttacttttttgtagagatggagtcttgctatcttacccaggctggtctcatctgtcttaaaggtctgtctgcacaacttcccagttccaagtcttctcctcaaattctcttcttttaaaaacatttttgtagttttttaattgttttatttaatagaaatggagtcttattgtcacccaggctgtgtgaggaaaacagtgtaaatctctcccttttaatttctggtgttgtgaggaagaatatagggaataaaaaaaggcgagtgcaatgtgtgaccacagctcattgtagccttgaattcctggactcagcaatcctcccgtctcagcctcctgagtagctgggactgcaggcgagtgccaccatgcccaactatacatctatatctatatctttatctatatctatatcatctatatctatatctgtatctatatgtatatcatctatatctatatctatgtctatatctatagatatatagcaggctcttgctatattgctcaggctggtcttgaactcctggcttcaaatgatcctccagccttgactcgggaagtagatgggactacgggtgctagccgccgcacctggctggaattcccttctgctgttccgtgaccccgtttgcatgtggggtactcagcttcgtaattatgaagctttgggctcatcacagtgatccagggtttttagaaaagtgcctcctttgcaaaatggattaaatcccagaaattgacttcgagccaaggatggtgattgttggcaatgcttctcaactttgaacatgcttgttaacacagagatcacggggtcccttccccagacgctctagttaagtaggtctgggccgagggctgctgctggagtggtgtccactctgagtagctgtggtgtgggggagccgccggtggtctttttgctctggaggagcctgtgatggtagcaaattacaaaacacacacccctgtgttcattgaccccagggtttctccaccactgggcaagaggaggacttttgggaaacaggagctatttcttacattattttgcctgtaggacccatggtgcacaaaggagcgggtgaagaaaacctcagctgacccttcaaaggttctactggggaccaggaaggaagttgagagaaactcattttcaaagggcctctgtctgactgaggaaaacattccaacttgaaacttccatgcctaacctcattttaacgtgaccagtgctcacaacttccaatctggtagctgaatatgggcccgtggaatgggtttctggatagacctgctttttagagagagtcaattttcttagaaccaggttatgagccatcaaggttttgaagcttacagggacgatttctaccctttagaacaaactaaagcaaacaaaagctctcatagaaggcacaggctgcaagccaggcactagggtagatgcaaagacagaagtcttggtaaagtttccaaagtgttgccttttatgcaggacatgagcaagacagtgataaacagaacacaaatgtggccttccagcagctcttggagtggtggcagaggcagccatggaaacaaactggggagagtgagtccacagggaggtggactgaacactgtgggcagagtcagggtgactcatcctgccaggggtgccaagggagagagcttcacggggatgtgatgtcggctttaagtctggaaggatgagttctggggggagaaaaaagaggcccaagaggggtggggcccatcgggtacaggcgacttggcagcaaggaagagaaagtgtggagtgtggcatgtctgaggggggcaaagtggtttcttactggggtgaggagagcttggtggggagccaggctggtgagatgagtggggattcttcctttgccaggccagtactgaggttctcagcgctcactacctgtcggcggcggcagggggcctccatgggtacagaagctccactcccctcaacgggctctgctccagtgggtctcaggtgagttctgtgcacctgagcttcctaaagtgcccccaaggattccaacatagaccacgcttgagagccactgctcagatgaaagcatgtggaaagtggggaacacacaggtttttaaacctgagagtgacaaggtcagatgtatatttcggaaatatcagtctggtgataggatagacaacagggctgggggtgttgagggaagttttggaggaaggatagggactcacaggcaagttgagtgctattgtgatagttcaggcaagcggtcataacttccttggcctgtggcagaaatggtggagaaggggaggagggtctagattagtgagatatccaggaagaaggaatggtgggctttgaggaggatgggtggtacaggcaagagatgggtcgtttcatgtcagagcttagagctggttgttcctgacagtggcttcctctgggaatagggtcccagagtttatgtttgtcaaatgagatcaaaagctctgcgtttaaaatttgaattctcagggatttaaagatgattaaagccaggaaatgctgaaggagctgaggagaaagatagaaaatgcctccagaaattgtgattgaggaaggaaaaaggccaggtgtggtgtgtgaggagatgtggacaggggacatgcagatgaagggatggcatggcagaaggaaaaacaagtataacagcgagaaactcttggtgaaatttagccagttgatggaaaaggccctccactaatcccagctacgccggaggctgaggcaggagaatgcttgaacccaggaggcagaggttgcagtgagccgagattgagccattgcactccagcctgggcaacaagagcgaagctccgtctcaaaaaaaaaaaaaaaaaaaaagaaattccaagtcattacctcaagcgcttcgctagggtggtggaggggatcaggagggagttcatgtcaatacggagctgatcaatacggttgggaccgcagcttagtgcaagaggtttgctatattcagcctggccaggagatggcagtgttgtcctgtcgggagcctctcatttcagcgccacttctctcttctataaaggggagttctgggggctaggtccccacttttctcttttcctgggtgatgctatctggagagtcagtcggtgaggcccagcttaacattgggcctgcacttggtggtttcttaggcagcgttcttgctggacaaatgcgcaaaaaataactgggaacaaccttgaggagattgcttggtgagattggactctatccccagacccggcgcactgggctgctggggaggaaaggcggatagaggttgtcagcctgatgaaaggtgaaggggggcacccctgggagagatttcaggcagctcctaatttgcaaatgaattcacttctccaattccttctgtcagttggctgtttctgtgggtgaaattatttgagttccaattataatgttatataaagaaggtaggttctcaggttagcccataaaactctgtttactctacaatatagatgagttgcagtgtatgtataatgaaaaataggaaacaacagtattgcggtactgtaatttaaataaaagaaagaaacaaaatggaatggaaacagttctttattttggtgagtgaagaaaattaggttgaattagagaaggagaaggaggcagatgaggcttgctgtgggacatataaaggaggcatttgggcactttaaaggcttatgggaagacccttgattgtgttctgtaagtttccaactcaagggaggggcgtctacaagttcaacagtctttgaggagccaagatcagattggcctggatctcgatgcctggtgtgcagaaggaacactggggtaggagtctgaagacttgggtttctattccagttttgggtaaactggcttaccttctctgggcctcattttcttcatttataaagtgagaatcaagtgaaataatgaaagtggtttttatgtacgaaggcactctggaatggtaaaatagtgggcttggatcttcagtcttcatattttcatttaaaactttttctttttttcttttttttcttttgatagagatgtctctttagcagctctaaaacatatttgctatgaatagccaccaacaggattattatgggttgcaaatggaagaaagagaaagggaagagtaaaagagaaagggaagagtaaaagagaaaggttcataaaggttagtgagaatctgtgtacactgcagaaacagtttcctctggagatgacattgactgagtctgtagtggaagtcaggagcagaggaagcgtggagtgcgcactagctctctatggaagacgggagcaggggacgcgtggagcgtgcactagtcctccatggaagtcaggagcagagaatgcctggaatgcgcactatccttccatagaagacaggagcagaggacgccggagtgcgcactagccctccgtggaagacgggagcagaggacatcggagtgcgcactagcagtccatggaagtcaggagcagagaatgcctggagggcgcactagccctccatagaagacaggagcagaggacgtcggagtgcgcactagccctccatggaagacgggagcagaggacggtggagtgcgcaccagtcctccgtggtagacaggagcagagaatgcctggagtgtgtactagccctccatggtagatgggaggagagaatgccaggagtgtgcactagccctccatagaagatgggagcagaggacgcgtggagtgcgcactagccctccttggaagtcgggagcagaggacgccgcagtgcgcactagccctccatggaagacaggcgcagaggacgccggagtgcgcactagcccttcatggaagacgggagcagaggatgcgtggagtgcgcaccagccctccatggaagtcaggagcaaaggatgtgtggagtgcgtactagccctccatggcagcatttcccaaatggtggcccctgaatctttgttcctccagatgtgctaaaagaaaaagaggcttgtggttaaataaatttgggaaaattttaaggggagttaaaccaaattctttattacagcacctgctagaaactttaatgtgataaatgcgttgcagatcccaagggggtgaagtgggaaagttatactatgcagtgtttgcaaacttatttgaccgtacacagttcttttgttgttttgatagtatttctcaaggtgtggttcagggaccacctgcattgacctggtgtttattagagcaggttgtctggcatcaccctagacttaataatcagccagaagggcagggagagacagggaatttgcatttttaagaaacacctcagtgtttatttcccccaatcaacacatttatttagcatatagtatgtgccaggctccatgctaggtgttgaagatatactagtgaataagacagttctaattctaatctcataaagctaattctaatgggggtcaaaataggggtggggtgctgggaatagaagcaacacacaattgcaatgtggtctagtcttactgcaatgggcaagacttgtgtggttagggaagctttactgtagtgaggctatatatagaacacttcaccaaaatatgtttgtaacaacagttgagacctatgatttatggaaatcccccatatgtcacatgagcacggcattccggaccctgacagatttgtgaatttcacataaaacccggtgactcttttgcacatttaatttgagaacaggtgaactagctagatggatgttctccaggaaacacttctaaggtgaaaaagatgttgactcacgctttctcctgatctggccaccaggtggcactgacaagctggggcgacttcgttgtgggcagaggcgggacagataattaggcagccttgcctaatctgcaaatctgcagaccttaatccatggagtattggtaatcctgtagatagtgcagtatgtggtgaaattagggaacacatcacaccatggggaatagaaaatgctaattattttcaatccctatctcattcgatttgcctgcatcatttgactctatggaccatcactttcttcttggaaatttcttttcctttggttcctaggacacagctctctcacggttttccttcaacccttaataataataagtaacatttattgggcacttaatataagccacgtcctgtgctaaatgctttgtacacacgatcatttaatgctccctatgaggtagctactctcattagctttatttagcaggtaagtcttacagagagattaagccatgggtccaaattacataactagtgagagtcggagttagcatcagggttgggacaaccctagtcatgagtcctagctcactgcacttatggcttccagagagccctgatggtttctgaatcgtccccatcatcctgtctgcttgcatcactactccagggtgcacttgcctttgtagactgtgcagctggggccctcctttctcagtttcttcctgtgcaagtctctagacacctcctaggcgatctcccccggcctgtcctgaagccagcctgggagcttccctctaaggaagcaatggccacactgtcttgtcatggtttgcttgtctgtgcccccctaccaggttctgagcccctctaggacaacttagtatcactggcacctagcgtgcttggcatatagtaaacagtcagaaatgttaatgggatgaacagcctcaaaagagggctggaggtacacagtcacagccattcctgaagaaatatagtgtgacattgcccacacaggtgtttgaaaacaaccctttgagtctaagacagaaagcgggttgaagggatttttttccagtccagtaaacctgtgactttgaattgggaaatactactaaggtcaacgggcaaggggccagtgcagagtgctgtgataaactgagaatgctaaggacgtgatggcattcattgtccaaatccatattataccccaaggccaggatggagccggggcaggtgcggctgcaggcattgagcactggcatcccctcaggggtgcagcagctgctcccctcccagatggtttctgagcatcagttcctcctctgcaccagaatgtttagcaatgtcctgggtggatgaacaaggagctgaatgaagagtctctgttctctggttgtcatgagtgtgtggtgatggggaagggagcccaggaatgaactcatctgaactacagacataacctgccttgggcgagataaggcaaagagtccacctgtgctctaggccttccttcttaagccctccttgaaatccagtcagcatggctgtttttcccaggtgtctgaccctgcccccaagatcatagacctatgctgtccaggatggcagccgctagccacgtgtagctactgagcacttgaatcgtggctggcatggccaagcgcagttgcccatgcctataatcccagcactttgggaggctggcgggtcacttgaggccaggagttcaagaccagcctggccagtatggtgaaaccccatctttactaaaatataaaaaaaattagctgggcatggtggcacatgcctgtcatcccagctactcaggtggctgaagcatgagaattacttgaactcgggaggtgtaagttgcagtgagccaagatcataccactgtattccagcctggatgacagagcaagactccatctcaaaaaaaaaaaaaaaaaaaaaagaaaaaagaaatatggcagacatagctgagctagtatacctttaattttatttcattgcaatgaatttaaatagtcacatgtggctattggtaccatattgaaccatattgaacagtgtacacacacttacacacacacatacacacagtttttgccctagtggctactatagaggtttttgatccctcctttcccaacaaacactggatttaactcaaaggtccattcttccttaggtttttgctatttccccccttttcctttaagaagccattgatggacctcattgatggaaagttctgtaagtgttgccaaggaacatcagtatatttttcctgtagctggcacctttgagggagtctggtctccaaggccatctgttttgcaagcaagggtgagacagccacattcctcatcctcagacctatgactctaccatggcgaaggcggtgaccagggagggctgggacatttgtgtcacagaaagagtccctgcattgatcatttctgagtgatgtctgagtgggggtaatacctaatgttaagaaagtaaccatctgactacatcaagacttttcattttcaaagtattttatttaaataaatttttcttttgtgtgtgtttgaattttacagaaaaaaatactgacaaatactatacagcttggaccctttatatttttcttggaaaggtggctgccatttttctacctttctccctccctgctccccccaagaaaaagaaacatggaatccattgagcaatggggaaaggagcaatggggaaaggcctcctctggctgccgtccggagcctggctaaagctgctcagaagtccaggcctaggggatgtctttctcgagcctgtgctggtctaggaagcctcttctttaggaatcatttttttgtcccccgtgaacttaccctccccagatgagtcaagcagtctctggtcctgaggtcccatgggttgccagtggcagttcagggacagaggctggaaggagtgaaaatggagaggaataaagggctggggctggtctggtgcaggcagaagagggaatcagagaagcataaaacatggagaaaaagatgagaag

SEQ ID NO: 65 - DNA, 4874 bp, Homo sapiens
atgttccgcttccctatggggctcctgcttggctctgtgctcctggtggcttcggccccagccactctggagcctcccggctgcagcaacaaggagcaacaggtcactgtcagccacacctacaagatcgatgtgcccaagtctgccttggttcaggttgacgctgaccctcagcccctcagtgacgatggggcttcgctcttggccctgggggaggccagggaggaacagaacatcatcttcaggcacaacatccgccttcagacgccacagaaggactgcgagttggcaggcagtgtccaggacctcctggcccgggtgaagaagctggaggaagagatggtggagatgaaggaacagtgtagtgcccagcgctgctgccagggagtcactgatctaagccgccactgcagcggccacgggaccttctccctggagacctgcagctgccactgcgaagagggcagggagggccccgcctgcgagcggctggcctgccccggggcgtgcagcggccacgggcgttgcgtggacgggcgctgcctgtgccatgagccctacgtgggtgccgactgcggctacccggcctgccctgagaactgcagcggacacggcgagtgcgtgcgcggcgtgtgccagtgccacgaagacttcatgtcggaggactgcagcgagaagcgctgtcccggcgactgcagcggccacggcttctgtgacacgggcgagtgctactgcgaggagggcttcacaggcctggactgtgcccaggtggtcaccccacagggcctgcagctgctcaagaacacggaggattctctgctggtgagctgggagccctccagccaggtggatcactacctcctcagctactaccccctggggaaggagctctctgggaagcagatccaagtgcccaaggagcagcacagctatgagattcttggtttgctgcctggaaccaagtacatagtcaccctgcgtaacgtcaagaatgaagtttctagcagcccacagcatctacttgccaccacagaccttgctgtgcttggcactgcctgggtgacagatgagactgagaactcccttgacgtggagtgggaaaacccctcaactgaggtggactactacaagctgcgatatggccccatgacaggacaggaggtagctgaggtcactgtgcccaagagcagtgaccccaagagccgatatgacatcactggtctgcacccggggactgagtataagatcacggtggtgcccatgagaggagagctggagggcaagccgatcctcctgaatggcaggacagaaattgacagtccaaccaatgttgtcactgatcgagtgactgaagacacagcaactgtctcctgggacccagtgcaggctgtcatagacaagtatgtagtgcgctacacttctgctgatggggacaccaaggaaatggcagtgcacaaggatgagagcagcactgtcctgacgggcctgaagccaggagaggcatacaaggtctacgtgtgggctgaaaggggcaaccaggggagcaagaaagctgacaccaatgccctcacagaaattgacagcccagcaaacctggtgactgaccgggtgactgagaataccgccaccatctcctgggacccggtacaggccaccattgacaagtacgtggtgcgctacacctctgctgacgaccaagagaccagagaggttctggtggggaaggagcagagcagcactgtcctgacaggcctgaggccaggtgtggagtacacagtgcatgtctgggcccagaagggggaccgagagagcaagaaggctgacaccaacgccccgacagatattgacagccccaaaaacctggtgactgaccgggtgacagagaatatggccacggtctcctgggacccggtgcaggccgccattgacaagtacgtggtgcgctacacctctgctggtggagagaccagggaggttccggtggggaaggagcagagcagcacagtcctgacaggcctgagaccgggtatggagtacatggtgcacgtgtgggcccagaagggggaccaggagagcaagaaggccgacaccaaggcccagacagacattgacagcccccaaaacctggtgaccgaccgggtgacagagaatatggccactgtctcctgggacccggtgcgggccaccattgacaggtatgtggtgcgctacacctctgccaaggacggagagaccagggaggttccggtggggaaggagcagagtagcactgtcctgacgggcctgaggccgggtgtggagtacacggtgcacgtgtgggcccagaagggggcccaggagagcaagaaggctgacaccaaggcccagacagacattgacagcccccaaaacctggtcactgactgggtgacagagaatacagccactgtctcctgggacccggtgcaggccaccattgacaggtatgtggtgcactacacgtctgccaacggagagaccagggaggttccagtggggaaggagcagagcagcactgtcctgacgggcctgaggccgggcatggagtacacggtgcacgtgtgggcccagaaggggaaccaggagagcaagaaggctgacaccaaggcccagacagaaattgacggccccaaaaacctagtgactgactgggtgacggagaatatggccactgtctcctgggacccggttcaggccaccattgacaagtacatggtgcgctacacctctgctgacggagagaccagggaggttctggtggggaaggagcacagcagcactgtcctgatgggcctgagaccaggcatggagtacatggtgcacgtgtgggcccagaagggggcccaggagagcaagaaggctgacaccaaggcccagacagaactcgaccctcccagaaaccttcgtccatctgctgtaacgcagtctggtggcatattgacctggacgcccccctctgctcagatccacggctacattctgacttaccagttcccagatggcacagttaaggagatgcagctgggacgggaagaccagaggtttgcgttgcaaggccttgagcaaggcgccacctaccctgtctcccttgttgcctttaagggtggtcgccggagcagaaatgtatccaccaccctctccacagttggtgcccgtttcccacacccttcggactgcagtcaggttcagcagaacagcaatgccgccagtggtctgtacaccatctacctgcatggcgatgccagccggcccctgcaggtgtactgtgacatggaaacggacggaggtggctggattgtcttccagaggcggaacactgggcagctggatttcttcaagcgatggaggagctatgtggaaggctttggggaccccatgaaggagttctggcttggacttgacaagctacacaacctcaccaccggcactccagcgcggtatgaggtgagagtggatttacagactgccaatgaatctgcctatgctatatatgatttcttccaagtggcctccagcaaggagcggtataagctgacagttgggaaatacagaggcacggcaggggatgctcttacttaccacaatggatggaagtttacaacttttgacagagacaacgatatcgcactcagcaactgtgccctgacacatcatggtggctggtggtataagaactgccacttggccaaccctaatggcagatatggggagaccaagcacagtgagggggtgaactgggagccttggaaaggacatgaattctccattccttacgtggagttgaaaatccgccctcatggctacagcagggagcctgtcctgggcagaaagaagcggacgctgagaggaaggctgcgaacgttctgatggcccgtgtgagcagtcctcgcaggagacaccaccagctgtgggagcttggggcggggtgggtagtggtcactgcggtctgggagtgctcagatagcccgcagaacaaatcatgtcaccaagcttcaagccatggaggttccttccctctcacctgcatttttgcccgtctttatgagggtcttgaaaatcaaaatagtagttgcacagtatgtgtaggaaagacagtactggaacggcaaggtttctcagcttatcttcagcaacatatatactggattagggcaagagaaggaatcacccagcacttcaccagttggaaatctctggaaatttacatctatgtatttaaagttctgctaatgcaaatcttttctctggaaagaagcacagaggaggagttctgatgacccaggggttagggctgagacaaccggacgtttgtcacctcctttcccattgggtttttaggaaaacagtgtgaacctcccccttttaatttctggtgttatgaggaagaataaaggggataaaaggggctaagatggactcatgtttagctaagttctgacttgtatccagcatgctggagaccaaagctgccgccttactgctatttttaagtgccctcttttcagtcatttgcataattgcgtccatagagctgcatatgttgtgaataaattctcactcatttcaactttgaataatttgactgtcttgataattggttcctcccaaagactcttctgcaactcccattcatgcccaccaggcctcagactccctcttttccccgccctgcactattggagccctgggttttgtgggagtgctcagcaccgtgagtcttactgtttgatcggacagttagcaagatcagatcctttttgcttattttctatcactttggagggttttctgtagcaaaatcagtgaccaatgaagtaacttaaattcctattgaagaaaaaaaataataaaccact

SEQ ID NO: 66 - protein, 1290 aa, Homo sapiens
MFRFPMGLLLGSVLLVASAPATLEPPGCSNKEQQVTVSHTYKIDVPKSALVQVDADPQPLSDDGASLLALGEAREEQNIIFRHNIRLQTPQKDCELAGSVQDLLARVKKLEEEMVEMKEQCSAQRCCQGVTDLSRHCSGHGTFSLETCSCHCEEGREGPACERLACPGACSGHGRCVDGRCLCHEPYVGADCGYPACPENCSGHGECVRGVCQCHEDFMSEDCSEKRCPGDCSGHGFCDTGECYCEEGFTGLDCAQVVTPQGLQLLKNTEDSLLVSWEPSSQVDHYLLSYYPLGKELSGKQIQVPKEQHSYEILGLLPGTKYIVTLRNVKNEVSSSPQHLLATTDLAVLGTAWVTDETENSLDVEWENPSTEVDYYKLRYGPMTGQEVAEVTVPKSSDPKSRYDITGLHPGTEYKITVVPMRGELEGKPILLNGRTEIDSPTNVVTDRVTEDTATVSWDPVQAVIDKYVVRYTSADGDTKEMAVHKDESSTVLTGLKPGEAYKVYVWAERGNQGSKKADTNALTEIDSPANLVTDRVTENTATISWDPVQATIDKYVVRYTSADDQETREVLVGKEQSSTVLTGLRPGVEYTVHVWAQKGDRESKKADTNAPTDIDSPKNLVTDRVTENMATVSWDPVQAAIDKYVVRYTSAGGETREVPVGKEQSSTVLTGLRPGMEYMVHVWAQKGDQESKKADTKAQTDIDSPQNLVTDRVTENMATVSWDPVRATIDRYVVRYTSAKDGETREVPVGKEQSSTVLTGLRPGVEYTVHVWAQKGAQESKKADTKAQTDIDSPQNLVTDWVTENTATVSWDPVQATIDRYVVHYTSANGETREVPVGKEQSSTVLTGLRPGMEYTVHVWAQKGNQESKKADTKAQTEIDGPKNLVTDWVTENMATVSWDPVQATIDKYMVRYTSADGETREVLVGKEHSSTVLMGLRPGMEYMVHVWAQKGAQESKKADTKAQTELDPPRNLRPSAVTQSGGILTWTPPSAQIHGYILTYQFPDGTVKEMQLGREDQRFALQGLEQGATYPVSLVAFKGGRRSRNVSTTLSTVGARFPHPSDCSQVQQNSNAASGTIYLHGDASRPLQVYCDMDGGGWIVFQRRNTGQLDFFKRWRSYVEGFGDPMKEFWLGLDKLHNLTTGTPARYEVRVDLQTANESAYAIYDFFQVASSKERYKLTVGKYRGTAGDALTYHNGWKFTTFDRDNDIALSNCALTHHGGWWYKNCHLANPNGRYGETKHSEGVNWEPWKGHEFSIPYVELKIRPHGYSREPVLGRKKRTLRGRLRTF

SEQ ID NO: 67 - DNA, 70931 bp, Mus musculus
  misc_feature (1)...(70931): n = A,T,C or G
atggcctggttatttctgtagaaccgggtgggaactggaattttagtacagggcaggaattggtgatgaggtttggtgtctgggtcattgatctcatcagcaaaaggctcagagaagccttccaggtcccctgcagctagaaggcctggaagccacatgtgccatggaagtcggagcatagaaggaaggtgacttgatggcctcttactgtgttgagaaaagaaaaattgtttcttcctttgctttcccctcccaactcaaccagtcttgttttagaggaaaccaaagtttggccattgtaatctgccctgctaattcttatacaaacaggaaatagagcagagttcagcagatgaaatcctggctcttccctcaccagctctgtccccttaggttgcatcacttctctgagccctggtgtcaactcctaacacagagatgacagcagcagcagcagtaataatcgtcatcccctgcagagggtaaactgttggtagatgttagctaatactatagattacacaagctttgtttgtatgggataaatccagtaagctgccaaaccagtcagtttcctgactcgtggatttgtgttgagttcactttggcacattcaatctatgagtctacaagccacagctgtaactggaggactagctccagttgtacgtgttatacctgagtctgggtgctttgttatacatgccagtgaacagaaatgatgttaaatctttaaactgtactttagttagatcctggccatctgagaaagtgataggttaacaccctgatgaaacccaacgctaccatctcatctttagtttataagattttgcaaaaagcttaaccttgccttcttgatcaggtgaccaccacattctgagattcgtggtgcctgcctttcacacttcccctcatctttctggctatctgggcttaggtaattcttggactactggcaagagtctggcagtgtctgctggtatcagcgctgcatctccacaggtgtttgaggcctggaaagttaacccagaaccaacagaccattaatagtgtgtaagtgcagagccctccccacagagccctcagagtggaatacaaggtcccctgttctccacctcctgtcatgtggtacacagtctcagcggaaggactcctttaatcccatttcagtatttcaaaggtatttgtaaggcacagacagtgcctgtgtactccccggcaccatggtggcacctgtattccctctccctgcctttgagcagtggctgaccctgcatactctcagttggaagctgtttctacactgagggtggtggaaatcatctgcaaagcgccgattgagcagtttagaatttcaggacctagggcttcccagttaaaattctggccttctagttttcagactggggcatgcaagtcctttccattatggttgataacccaaggttaatatgaaaggggtgtgggggttgaaatggcaagatccaggaaaaagaaatgaaagggcttgccactgggtataaggtaacagagcagataagaaagacagagctttgagccagtactgcttggctggctgcagtgccccggaagatatacacaaaactctattggtttttttttttttttttttatacattctttttctggtagttttaatagactaaattataaacaagaacaggctttttttgttttgttttaaataaatctatttctttccaaaatatgttttgttctgcattttctaaaaaggtgactacccaagactaacctgtagacaaggagttaaacatgaggtaaccaagagaaactacatcttggtcaactatgataaggataaatttatccacagacagtaaaagaaaagggcttatggtaaagtactagctggttatgtaaatttgagaacaaatcgtctaattagcagttagcagacctcatgaagtcagatggtagcagtgctggctggggctagcactgtccagtgggcagtgccaacagcaagtcagatgcacagaagactgcaacacgacatgcccacttctctagttgagccaagtgtgagcctgcatgagtgtctccctgcttggaccagtggggctgtgggaacatgctgacttcccagagaattaaccagactaataaaaatggccccagtctcatcccagattctgccataagtcatattaagagcccacagacaagcagttcacccccctcccatacatcagcaagtagaacttctctggctgccccgtccagttcttttgcttgtcttccagagctcagtgatcattcttttttcacccctctctgtaataaaaaaacactttaagcccatccttttggttgttcatgaatttcatcctgggtgttcatgagaaaaggacccagcatggaaatcttgtgtgattgtgaccatacagcacccaagctcctgagttaagctttccactcagggatcatcaccacccccaattgttgccttcacccactcctgttctgtttcatagctacctgctgggagcttcagcacctggtagtttactcagggacactcgcgggcttcctgatggattgctattttcagttcatacttccaggtaatgagggtattgtgttttgacttaatagaagtgctgaagccactcgcaggcctagctcctggcacatttcctcatagtcctcctgtagtccttgggaggatggtttccaagggctggtgggcaaggccagcgagggagaatggagactggtattcacggcctgtggaatgcagtttggattcctctttcaaaaaggaaagcagtgagagcagctgtcttatcttctcattttgacctctttcccaggcaaggaccatacactgtttactcgtgaaagccagcgctgtgcctgcctcagcagtgagaagggaggggcagtgacaaggagggggcagtgagaagggggggtagtgagaaggggcagtgagaagggggggcagtgagaaggagagggcagtgagaaggaaggggcagagagaaggaaggggcagagagaaggaaggggcagtgagaaggaaggggcagagagaaggaaggggcagtgagaaggagagggcagtgagaagggggggcagagagaaggaaggggcagtgagaaggagagggcagtgagaaggaaggggcagtgagaaggagagggcagtgagaaggaaggggcagagagaaggaaggggcagagagaaggagagggcagtgagaaggggcagtgagaaggagaggcagtgagaaggagaggcagcgagaaggggggcagtgagaaggggggcagtgagaaggaagggatagtgagaagggggcgcagtgagaagggaggggcagtgacaaggagggggcaatgagaaggagagggcagtgagaaggggcagtgagaaggagaggcagtgagaaggagaggcagtgagaaggggggcagtgagaaggggggcattgagaaggaaggggcagtgagaaggggggcattgagaaggaaggggcagtgagaaggaaggggcagagagaaggaaggggcagagagaaggaaggggcagagagaaggaaggggcagagagaaggaaggggcagagagaaggaaggggcagagagaaggaaggggcagagagaaggaaggggcagagagaaggaaggggcagtgagaaggaaggggcagagagaaggaaggggcagtgagaaggagagggcagtgagaaggagaggcagcgagaaggggggcagtgagaaggggggcagtgagaaggaagggatagtgagaagggggcgcagtgagaagggaggggcagtgacaaggagggggcaatgagaaggagagnnnnnnnnnnnnnnnnnnnnggggcagtgagaaggagggccagtgagtaagggggcagtgagaaggggggcagtgagaagggggggcagtgagaaggggggcagtgagaaggagaggcagtgagaaggggggcagtgagaaggagaggcagtgagaaggggggcagtgagaaggagaggcagtgagaagggggggcagtgagaagggggggcagtgagaaggggggcagtgagaaggagaggcagtgagaaggagaggcagtgagaagggggggcagtgagaagggggggcagtgagaaggggcaggagtgacagagacgctgttgtgattggggagaggaaggttcttcagaagggaagagagtgacatatgtctatacacgtttgcaaatctgttgacagaaacagcttcgaacctcattgcttttctaaacacttcattttcattccctcctcccttttcttcccctttctcttccccttccccttccttttccccttccctccttcctttgactggatctcatgaagctcagggtgctgtattattctttaaaaagaaaagaaacctgaccacttgccatgtatggcaccaacttgcccttgggagaagagtcaggagtacaagatctgtcagatacacagtgagcttgaggccaaccaggaattcgtaagatcctgtcccccaaaataaagcaaaaaaaggaaacacacacacactaaaaacttgagtgttaagtagatgtttctgttccctccccatatctaggtccagtctcctggtagttgatgttagtagttttgtatcttcgcatgtggctgtataaacctctgcatagatagcctgtgtcagcacattaccctgggctgccacattcaagatcaccacccatatggcttaaacaaaactctaatgcctcatttccagaggtgaaaagccccagagtaagattttggcaagttgtcttctaaatgacccctgtagagtcttcttacatggcagtccctgtgactctgacaagcccctgtgttcagggctgttccaatgatcctgttcaaaaccctaccctctaaagaccaaataaagtcacacttttgggtaccagagactagtacttcaacatgtgaattttgaaggagacacaggctcagtaatattaaccttctcatttcaaaacagtatcctattgtgtagaaagcccacgattactttaacattaggcctaatgcaaatggattgtaggctttctcgatgtttgtaactaagtcttgggatgctcataggtgtgattctgccaggatgaacttggaagaattgtaagtaatgccctctgaagagtataaaaattatatggaggggagttcatgaagcctcaaccctataaggtatacaaagagctacaggcaactaaggaatgtcaaagcaggaaaagtgttccccggggaagagcacaccattggttatctaataccagtggtcagccctgaaaacacacacacaaataacactttacagtaagagcagggcacctattcatctttaggactatatatgtgtatgcttatatgcatgtaaaaacagtaatgaaaacagaagccatgaatttgaaagagtaaggaggcatatatgggaaggtttggagggaggacagcgaagtgtgaaatgatgtaattatgttctcaaaaataaaattgaaaaaagtaaagtgaaaattataccccttaattcttggtgatacgacgctggtaggagattgagttcagcgtgtggcttgtgatggtggcccagggcctggggttgcttgtgcttttgtttgagggttttccacccacatgacttcatcatacattactcactgaacatctatttactgaggcaagggtggacagcgccgctttgttcatttttaatttttatcttaaacaaaaggctttttaaaagagtaattttgagctcatagcaaaactgaatagaaaaacagaaactttttccatatgctctgttcccacagaagtgtaccctccccagtgatgactggctttctcccatggtgaccagcctcctcctgcggtcatcattatctaatgtgatgatcagcgtcctcccaggatcagctttcctaatgacatcagtgtcttgccatgtcaccatgctctctcttggacagcatccctcagcacagagaccagtttatacctcatgagtctgtatgtccccttggtttcccaaagtccctagtttacgttacagctcagtcttggtgctctaaaccctgtgtttgttttataagcctgacttgtttggcaaaaggcttatgccctgtagagccaggaataggacagtggcttttctctccaagcttgtgacagcctggagtttgtccagcaggaattttctaaggtgaagaactggaggaggttctgccagggtaataacactctggaggcaggggctggatgaatctattatatcctaagttgtgttctccctacagtgtggccagtcagtgcaggtggagtaagaatttcttggaatgctagcgttccttttatagactctgttggcagtgtccacatagtacatttgtcagcatttagcttaaggcaatgcatgccttcccttgtttattggtatagtttgctttgaagggtgactcttgatatagtagagaaaggctattgttgaattgcaatatttttataatctttatacaatatgtacacgcatataaatgtacatatgtctgggttttggcagtactgtttttagacctgtggcactgcacatgctaggtagattctctacactggaccaaagcactgcaagtaaatagtgctgcttgacaaactcggtgcatacattgatacatgacttaaacatgaattaaaccacctgcttcgttttagtgttctccataatcgtatcctttctgtgaccatttagacaaatttaaatatctgtatgcattccttttcccatctgtggagatagtaagcctaaccatcgactctgccgtggtacagttccatccttagctagaagctttctagctcattctgaatgcctgagatgttggcctgtaaagggatgagacatcctgcctgggttttgaaagtgattggctattcctgtgctttgggccagtgacaggcagcacagcatgaggggagcatctgacagaagagccagggcctcccaggcctttctgtgacctgatcttgctctagctttgcacttaggtcagacatcttcaacatttgggtcatgaccccctttatgggccaagtgaccctttcataggggttacctgagaccatcagaaaacacagcaggttatggttcatagcagtgacaaaattaaagttatgaagtagcaacaaaaataattttgtggttggggggtcaccacagcatgaggaagtgtgttaaggggtcacagcgttaggaaggttagcgaccactgtcttaggttggatgtggccgggccagtcttttgccacatttgagcagtgcttaagattcaaactttagtgaactgcttctaaaggaattttctttcctaatagggtattttgtcacatctgaacttggtatgcagcgaatatggttatctgaaacaacgtggcttaaagaaaagctaggaaagaggagagagagccagggaatcaagctagttttgggggtggggtggagggaagagagaattaaaaaagaggaagatctgtacacatatggaaagagtcaataaaatcagagatgtcagtggggaccaagaggcctgagggtatggagttggtagtgctttgcctgtacaaggccttgggttcaatcctagaacgttatggtggtgcatgtctgcattcccagcctttgggaggaggagcttgaggccaaaacaaaacaccagccaacaggatgtctgtatgtaaagggaacagcagctatgctggtaaagaccacgtgtagcaccgctctttgcacgctctgtctgttggctcagcctacggagaatttgttaaaagcggtggcctgtttagccttttgagtaagatggcttgaaaagttgagtgctagatgctaagaagacgttagcaggaatttgaagccatgttgccatcctgaagggcagagactccaacaccagtgctttcatgaagtaaggaaggaagcttgtgatatgaccagacttcggagatctatgacattgttataatttgctgtattttcaacacaccctgctacctagtctcactgtacatgatgtttataatatagtcttgtaactcgtgcttgtttggaagctttgcaaagttcccaaacttccagatcattttcaagaaattgaactattagggcttaggttcaatataaaacagtgttggcactcacagattcagatgtagtttgcagtttatggcaattcctttcagagaggctctgttgtgtaaaatctcctttacaccagctgcagctgagggggcttccaaacgaccacagcaacgataagggacatgtagcgtctgttcccactgttactttataagtggggataccgagtcttaatttctaggtggcagagtctaactcacagtccacaaaggctgatttctctcctgagctgctatccacttactagcctgctgccttatgttttatcgaagatctagttttcccaaataatgggggcagagagaatgttgaattggttcagtatgtgctgtacaagcaagagaaattgatatgatttctgggacccacataaaaaactgggtgtggcagcctacccctgtagttccagtcgccatgggcttcctggccagctcatctgggtgagtggatgaggtccacattcagaggaagactctgtcttgaaaaacaaagtggaaaagtgtcaggagcggcatccagtgcagacccctggcctccacccacatgcatgtgcagtacacatggccatgtgacccagtgacctagtttccccaagtgaaagacgtatatactctagtggtacatcaagagtctctgccctgagcctatactgcactcaatagcctagaaagactgctgtaaggggcactagactgagaaataaacagtgcctgcataagagcttactgatgcccttcttcaaggatagccttacttgtgtaaggagtacttagtagaactcccagcgtgtccctaggtgttcgttggacatttgtattgctgggtccaggttcttgtttttcatgttcttcttctttaatggaatattttttctaggttttagctgttgcttttgctcttagctgatcccagaaacctttgtttgctcttaagtgtaatgactgtgtacttctgagaaagtccctttcctgtttatttctggccgtctcccaagctattagtgctcatcatttgagacagcatctgactagttctaacaagctctgccatgcaccagactcttctcatgtcccgtggtctgatgatcaatagaacagtcaccttgtagcctgggaaggccaccagccaaaatgtttgtaaagggtcaatgtttgtaaagtagtagatttgtatatgatatcaactggatctcttataatttagttcaaatttgacactacccaggtttgataccatctcacaagactgtcccaacttccaagactgatcataatctgaacctcccatagtcaatctgattgggtataagcctgagctcttagactttccacctagggttcagcaatgggcatatcttcttcgtgtacttactgacattgaaattctgaattccactgatgagggtttttgtaaagatgccagcgtatatcataactgattcagtcatcagccattggccacttaaccaccattctccctctgtgaggaaagagcggggacctgaaattcccaatcttcagtgtcatgtggctgacttctggcaggcagattccactctacagtgactggggagggggctcaccaagagtcatggcattaagtatagactcaggagtggtttaaagggggttatgaataccaggacactccttgcccacccgtcaaattccagtggttttagaggctcgtattccatgttttcttgctgtgtcacagtagcacactctgaagggatgtttgtgtctttcctagttggcctgctgttgcggatctgctggctgctccctctgctgtggctgctgccctaagttccgacagtctcggaccacccgcttcatgtatttattctacttcatcctggtcatcgccctctgctgtgtgatgatgacaccctctgtgatgaagcaggtgaaggaccacgtaagtctgtgggttttgataagttgtatgtgaaacttgatgtagaggactgagttcaacatcactgtgattgggggcttgtttcttgtctgctgctgtgataaaacattctaacaaggcaacttatacaaggaagagtttatttcatcttatggttccagagggataagagcccatcacggcggcttggcatgacagcacgtagttggcatgacagcacgaagttgaaagctcacaacctgaaccataacacaaagcagagagaacagaatggaagtgggcaaggccttttatttagcctgcctccccacccctgtgttgtactttctccatcagggccactccatctacatctcctcagctccacctacatctcaaacagcaccaccagccagctggggacagagtattcaaatgtctgaggctacggggggttgggggagggcatttctcattcaaaccaccacacttggtctctgaattgtctcaaagcttgtccactgctttcaggccaaacaggcaagccattcaacagctggatctttaatccactaattagtgtttggcctgatgtatagaatgtctatggatgtgatgtatgtccatgatggttgcacacaagtctgtctgaatgcccatgaagactgaaaggacatcaggtgttctacctattacgctctgtcttgtctctttgagacctggtctcatgctaaccttagagctgggttggttattggaggccagcgagcctcagtgatactcttacccatcgtgctgaggttatggaagcacgcatgggtatgctcaacattttacataggtggtagggattcaaaatcaaattttcacacttaggcagcaaggcagagccactcggtttagccactgggccatctttccagcccctagtagttttatccttagtagtaggatatccatagttagatgctgttggtagatgtcagaggattatgtttggtctttctttgtttatatctgtttctgataaaaacacagcctctgcatgtagaactttgcacatctttttatcttaaggatgactgccagtatttcaagtcatggctggttatacacacttaattcagcctttatggaaaggatggtgcagtttagacagtgccacagataccaggaagtagtgtgcgatgattttaacctttctagacagatcacttgtccattgttgtctctgggtggaaggaagagtcccagtcctttcttgggcagtgtgttttgagggatccctggagtgtgatgttcatggagatggatgtggggtctttcctgtccccacatagcaggcctctctgagccatattagaggatagtgtgttgaagtctcaagaaagcccaataaacaacacaattctttctgtcctaggttttgagaaaagagactataaaatgtcatcaagtagaggccagatatcatggttattatttaacaagtcacatgaaacctttcagtttgtatttgcagtgaggtcagcttcctcctcagctcctgaaccaatcagtgcattcacctctgctccattggcgtggttcatgatagatttcctcttctagggcacagttggccaggaagagaggacagcagtgtgttgaggcggctcttgtctcaggggaaatggtagatgaaagcatagctgtccaagtccatttgcctttaaagtaccgctgagccctcatactcctgggcaggcaatgaggtggcagagcagccaggcctagagtggtcctgtatcccttctgcagtgattatagtctccattggagcaactcctaagcaaacagtcccagtcctggtccgtgctgtggccatttcaaacacacccattttctttccccttctctttatggtcagagcgggaccggggccccgcatgtactaggcagtccctgaactattgacctacatcccagctgaaacaaccattttcttacaggctcttggtctattatcctgtttatcctttagttagaataggcccactgagcttcctgttgggtaatacatttctgattgtacttgtatgcttttgattacagaataaacgactgtaaagcctctgattaaggcaccacagtgggggatatgtatgtttagatgaaaagcgaagtttgtcacttggaaaaaaaagatgggaaattccctgaggcctataccaaggtaaaaagaataggttccatgtgggaagatactgtagatgtttggagcagagaccaaggccttgggtgcctggaggggtctgtgctaagacttgctctgtgcttattgatatatttaccacctggtcccctcctggcatcgtggcttaacttaatgtgtttagggaaagatgtgtgaactcacaggactggaaatatgactcagcagttaggaacaaacagtgtgcttgcagaggaccaagtgcgggtcccagtacccacttcatatagctcaaagcctcctgtagctctagccccagggggtctggcaccctcctctggcctctgtgcgtgctcttcccctattttattaaaaaataatatatcattaaacagtatatataattaaaaatgaaaactttttaaattaaaaaaaaatagctagactgctagaaggattggtttgaactcttcctggacagaatgtagaagtctgttgaagcccttttacattcatccatttagatgacctcacatgggctagtgggtcctgcaccactgagccgcacctcagccctccgttcactacttttatttttctagtaatgtagtactctctttttaaattcataagcagcctgtggtgacagtcctctgtctcagcttgatgacccactgtggtcctgtggtgacagtcctctgtctcagctatctggtaggagctctgctcttaacttttcagtacgagtacaatgaaagccttagatccaagagacgaaagtctatgcctatgttattagtaacatctcttactgcaattgcaattgtgtaggtaatctggaagccacagctatgtgttttaggcatacattttgtaataactcacacactggattcctatttaagtatcctgctcctgccccatgcaacagccctaacaattccttcctgtatctctgctgcctgactcctggcagaatcttcaaaaggaagatgctgactggagttgcccaggaaggcttcatggaggcagtggtgtgtgtacatagtaagtattttaagagctggtttttataggataatgccaggtgccagattttagttggagcattttccctgtatcttcatccttcgttaccactggtctcgtgtatgcagaaggtggtggtgttatcccactctacaggtgaggaagcaacgagtcacctaaccagtttatgctggtcttatagccaactactggaggtagacttgggatttgaacagggcagattatgtgctcagctcctgggctgtgtagctggaaaggcagagaaagagcaaggatagggcatgtacagagggacagggaaagaaaagacagtgtctcacatgatcagatcccactggatttcctgttataagataaaggagcatccatcatagagtcccaagcagaggtgtgatcgtggagcagggggagactgaaggaagtgagatcactggggtgagtcgggatcagagatcagatggagagggaggggaagggaaggtgtaaccctggcgcctcgcagagtggtttgtcaatgtttcatgcatgcctctgaatgtacctatttaaaaatggcttggccaggcttcttgcatagagagtgaggtcactctgagtgaaacaaatcgttttcccttcacaggggatagctatgtggccacaaagtcagcttattttgtggtgctacaatcaggctgacctcatgctcaggcggtgtttgagggtgggccctgaaaggtctccttgtagtgcataggctggcctttggctggctcttgcctgctctttgttggcctgtgggaatgctagaggtgacagtagcagaggagaaaaagaaccacaagcttgtggcctggatggggtgttattgccacccactctgcattcttgcctcttagctaggcccctgtcggggtcacgtggcctgtggtgtgagggccactttctggtttcagaatgtgatatctcagtgagaaggaccagtgaggcaacttggtcctgcttttcatgaggggagccctcctgagaccggagaagggtctcctgtatgttgagtcacagcgagtggtttttgtcttcttggagcgagccttttttttcccatgccagaatgtaggagccgtttaggctggctgctcttggcagtcaccatagcatccaagcaagtacagaatgtgggagcaccagtggacattagaatgctgaacaccagtggacattagaatgttgaacaccagtggacattagaatgttgaacacaagaggcaaagcaagtgaaggagtaagggctccaggtctgcactgaaaaaccaagatctgtctgcctggtttgaagataaaaggtgacagttgagtgtcccagaagctggtcatttgggagagagggcaaaaaataaaggcgctctctctctctctctctctctctctctctctctctctctctctctctctctctttcgagacagggtttctctgtgtagccctggctgtcctggaactcactctgatttctggcctcgagctcagaaatccgcctgcctctgcctcccaagtgctgggattaaagacatgcgccaccaccaccaggcaaaataaaggctcttgtgtgctgaggaacaaagatctcctggccttttccgctgagagctcactgcccactgtgggaagaacctttggtgctggaacctttcatgccttaggttcatcttctcctgccttccacttggcacctccattgccctgatggatgcagatgtcagacatggtgcatttaaaaatgtcaaaaccccaacatatcctaaacagtgctgtgaactcatttgtctgatatctggtgtgtggagcatgatgtaatatggttgctttacatttaagttgtaaagaagttctccttttgttgtgaagagagtctggtacaatctctgctgtctttttgtcgctcctacagtcatgtttagaaggtgttatgtctggctgtaccttctgatctctgcacacattttattttgcacattatttcccagaggtgagtcaggatagttttgagtggcagtgacttggcaactgacgactttgactaggttttccctagctgacaagggcttttgcacttgttttcaacatatggagcacctgcaaggaacacaggacaagactgaatgggatctgggtgtgaggaacgtctgcctcatgggattgtacaacagcatctcccaccttttcttcctggcctggatgaaggtagccaggttgactatgtctctctcctggctccggactcatggccacagccagattcagatggctcagatgaggatagacaaactcttggaactatacagttggcttttatttgctgccttgaggggaactggcatgcagtaatgagaccctaaccctgggctgtgcttgtatctaggcattagcaattcttggaatagctttgtgtttctgatggagttgtatgtgtcaagatagacacctgggctcttttaggtgaccattcaggctgcgggggagcagggaggtcagttagcaagcgggttagagtgagcttttcaaataaacttgcatggccttgggctgagaaacaagacacccttcttgcttacagctagtttgtccgttatcaactagcctgagtatgtccatcaaggaacttgagaaatcactttgttatctatctactttgcatagcatttggctctactctgcttctgtctcttactcatagggcagggctgggacaccttagagtctctgaggtcctccttctccaggaaccatttgtcacctgctcttttcttttgctctgtcttttcactctgggcattgagtgtacactttctgcagtttttgcatttttcttaagaggcaaaggtactttgagtctgatagctgtgcatttggagtctttgaatgtggttagtgggatggattaaaaggatttctctgtgtggccagaaaactcactctttgaaaacacagggatgagctagacatacgaagttggtatttcccagtcattttcacattgggcaagaagaaatttatgtcttcattaacatactgtggcactgacagatgataaagaaaatgtttaaagtaaactaagggtcctaaggctacctgctataatgcagaaataccaacttctcaattccctttaactttaagcttgcaatcctggctgtgacctcctgctaccctggtctgttttgggaccttgccataccagccattgctggtagagttctgatctcggcctcctgtttttcagagcccatcagctatgtggctagaacctgtgtcttgccattaaaactacttccctaaactacttgcctccatctgtctacaaccccaatcctggagtgcagcaaggccacccttcttctggtgaagctctgcatagcacctgcctggatcacgagtcaccctcagccacaggctcctccatctctgtcagcccttcccttttctttctctcattacagacttgtcatcttccagaagcattctcccccttttcgcctgtccttagtaaatccagagccaccctggcttcttgttgctccttcatttttcttgtccttccttgtagaggcttcctgtttagggcaatattgcatggtagttgagagtttgagcttcaaatctggacagctgaattttgaatcctggctcagttacttagcaaagttttttactctttctaccttgatcttctgtttaaagggaaaaaaaagataatagtaaatcaagatgttgcttaagtgtttgggtgccctagactgcatggggtcctgggtttgaccctgattaccaacccatctcatttctccataaatatatatcatagtcatccagtccacaggcatgtgaaaacccactgatctaatccgggaagcatgcttagaacaatacctggcacattggtttcccagtagcatgttgacatctccagcatccaagaagtcagcaatctgagtcatatcttgtacagctttattgagatccgattcatataacttacaattgagttatgcaactggcactgtaatacatagccttagaacattttgtcactcctaaagcaactatatttattcacacatgcttcctatttcttcccaagttcctccagccctacagagccactattctattttctttctatatggatttgcttattttagatgtttccatataaacggagttacacaatactagaatttgaatgtgtctccgaagaaacttagtttccaagttcatttcctacttggatacaggactttagggggcataactagggttagatgaggttataaagtgcagacccctatggtgacagaagttctctctgaaaagaggaagaaagacctgagctggcacagttgctgaagcttgccttgtgatgtcctgtactgtagaatgatgcagcgctaaggtcccctctgataccagctttgtgctcttacgtttcccagtgtctaggaccatgagctgaacaaaaatctgttttttcttttaaaaattatgatgtattaggtattttattatagtaacaacaaaacatactatgtatttttttctacatgacctctttcacttagcatgttttaaaaggtcaagcacactgtagcatatgtcagcactttcttcctttgtatggctggatagtagtctacttatgaatactccatattttattagttcattcctcagttgatggacaatttatgctatttttaccttttggcacacaatgtcacctttttgtatgtgtatataattattttctgggtatatacctaacagtagaatttgttctacaatctaggcattctggaccatatgaaaacaccttgtgtaatctttttttttcttttttttattattattacgtattttcctcaattatatttccaatgctatcccaaaagtcccccacaccccccctcagtcccctacccacccattcccatttttttggccctggcgttcccctgtactggggcatataaagtttgcctgaccaatgggcctctctttgcagtgatggccgatacatatgcagctagagacaagagctctggggtactggttagttcataatgttgttccaccgatagggttgcagatctctttagctccttggatactttctctagctcctccattgggggccctgtgatccatccaatagttgactgtgagcatccacttttgtgtttgctaggccccggaaccttgtgtaatcttttgaggaattccagtactgtttccaaaatagttgcatcattaacatcctcaccactgtgtgaaactttcattaagtgatgtataaatgttcaagtttcttctacccttgccaactcatattatttccatctccccatctttgtgggtctgtgatctctctacctgtgccttaaaggctaccctgagccgggcttggtggctcacgcctttaatcccagcactcgggaggcagagacaggcggatttctgagttcgaggcctgcctggtctacagagtgagttccaggacagccagggctacacagagaaaccctgtctcgaaaaaaaaaatgtctctacacagtaagggacttttttggaatcacttacagtctgcagtccaactaacccaacaatgggaggctgtgaatgaaaatgctacaaatctagtagtagttgttcgatcccacgaggctgggtatcccagctggtcttctgtataagctgaagtcttgaagacataggttccagcagatgtgctggcaagtatgtgccaccgccttccttcttccagtgtcctatgtaggcctccagcagaaggtatggcctagactaaaggtgtgtacgagcacacctagacagttcttgaaacttgctctgtcccaggctggccttgaactcaggtctgcttgtctcagtctcctgggattaaaggcatgtaccaccttgcctgggcctaagcttttcacagccacgatgccgcaggatccggatcaaaagcatctgtcttccagcctcaagatctggatcacaggtgtgctcttcatttctggattgtagttcattccagatgtagtcaaattgacaactgggaatagctgtcatgggtaccttcacttagaacattgccagagtcttcctcctccttcccatttttatatccagtactgataacagactttccacagacaggacattgaggtactgagtttgtgctgtgcgttctattcagtcatgaatgagttagctaggctaggctcctgccagcagcctttcttatctagacaattgatcccatgggtgagctgagggcactgttgctacttctctttctcccacatcaatcctgttccagattcttggagtcactcattggcttgtctgttagccaccgaagctactgtgcttgggtgtttgtttgtttgtttgttttgttttatcgagacagggtttctctgtatagccctggctgtcctggaactcactctgtagaccaggctggccttgaactcagaaaaacacctgcttctgcctcccaagtactgggatcaaaggtgtgcgccaccaccttccccggctttgcttgggctttgaaagtcttgctaagtgcagcatctagttgcctagttagttctgatgactttttacactcctttggtggttcttggagtggagtggttcatgaaatgcttccatacaatgtttaggactctagatgggcagataagctactttttctcctattttcagagggctatgatgacataattgtcagccttgtgcatagttcaccttcctggcctagtcacggggatcccgagaactaaggtctgaggctaaagtgtttaattaaagaaataagcaaagccaggatgcagctcccatctgtgattggtgacagtaaacagctgggcctattaagtgttacactgagaaacagtgttgtcttttacaggttataatttgagtcagttggtagaagaataaaggagactggaagagcagaaaagccctaagtggtcattttaactctccagtcatctaacagatgacatagctcatgaagtgaagtggtttgcccaaggcttaaaacactagttacaacccagggtccctggttgcttgaccagtgtttcctgttcatatcactaggtttgcttgttggccagataatcacagaaataaccatcctagcctaaagcaagcatagcttgctctgtctcctaaacactggatacaggagcagagaggaggagtctgtctaggaactgccttcttgtaatagtgacatccatttagtaagcagagccttccttgactcctgaatgttctctgggcacagtagcaggaaggaatgattccttctggaaaggtcaccttcccacctgcctccttcccatccttcagccaaaagctgggctcaaagaaggaaaacagaatagccacaaacgatttatttggttttgcctggaaagtgaaacctactcttgggttatgttttgtgtatcttcaaaagacagacaacatcattggtgaaaaatatatcactttgatgcaaaacaccacagtttgtggtgcagagcagcagggattcatgctaaagggcaaaagtctggctctctgactgagtttggtctctgttggttgagtgttcaaagtgctgggcccagaggttgttttagttgaattctagacccaggcaaaactccccattctcagcagctacctgttttcttattctggagaaattttaagtttattattttaacccagctgagtgaaacaactttcaaaagttcttttgaacaacagctgagttccgtgtcagtatgctttgtgggtcagtagtgtggagccccagttcctgtggatcactaggagctgcagaggtctcctgggctgggagttccacttcttattttccctggtcccatccctcctcagcatggcttggtggggacaatgttatttttcatccgaggtcttctaggccggaaacaaacaatccctgcaagtcccagccttggctcctctctgctgctcctgccctccatacagtgaatgaggctgggagattgttttgtacttgaggcagtgctttgagcgatgatgagaggctttggctagactctgaatcaagggctaagattgactcttgtctagaaaccacgagcttgtcaggagctgtacagtaggtaatgttcactgtccttgtctgtcagatcccttgcacagaaccctttggaaggtcccggatgtgagctggctctttttaaagattgtcctgcctatggtagggagaaagtgatgaggtgagaatgtgaattattctcagtcctttcactttgaccatcaaaagcatccgttaaatgactggcccccaaacactcccagataaatggaatagtcgggtgcttacagttagaatgaatgctattacctgccataaaaatggagccagaggagcagacaccacagcacagaaggagctaagatgaactaggctcagagtcacgggaggaagctcatggatgctgggaacacagtaccatccaaaccccatggggccttatttctgtggttttcattatctaaggtcaatggaaatccaaaaatattacgtggaaaattccagaaataaataattcaaagctttaaattatgcagcactctcctactctatcctgcttaggacatgaattatccctttgtcccaccaactgtcactcagtggacgttttggtcatcagatctgctattgtggtatcagtacttttactcaagcaatcctttgtttgtttgcatatttgttggttgatactggggattgaacccagggccttgtatgtgctgggcagttactctcccaataagctgtaactaacctcacctcttctctcctcttcttcctcttttcttccaccttcttctcctcctcctcttctttccacccctctcttttaagatagggtctctctaagtgtcctaggttgtcctcaaacctgtaattcttttgctttagcatccagatgtttagatttttaggaatgtgccatcaaactcagctcaagtgacccttttacatgcctcccaagggtaagagtattgatgttggctgttttattacagtgcactgctgctattgttttattttatcataggaattgtgcagctattactcagattgattgcccatagttctaggcacccattgttttggagaaaggatctcatacagctcattctggcttccagctcagtacatggctagggatgcccttgaactcatttctgtctctacctcgtcaatgctggtattacaggtgtgtactgtatatctgcaaataaagtgagatcggtgtggtttaattttgatggtccttttacaaagtataagggatattgtttggccacactacaatctcagtacattctttttggattgtggggttttgtaacagggcctgtgtccagaatagcagcagaatgtgctatatagctcaggatgtgctagaactagtagtaccttctatcctagccattgtagtgctgggcactttgatgataggtgtgcactgccagctgctgagtacattctctgctccattttcttttgttttgattcattggagagaggaagagaaagagacagagagacagggacagagtatatttgagataagatcttttaagatcttattttgtagtgtagactagccttgtctgaacttcctttgtagttcaggctagcttttaattcaagtggtctgtctgtcttttaccctctagagtacttcaatacagacaagcaccatgatgcccaattgctgatcccattatttaaaaactgcttaaaatctgctgctttcattgatttatccatttggtaccattaagcataggtaccaaaaactcaggtgttctaggataacaacataaggcactgaacctcaggtaggggaaaccaatagtttggtagctggcttttgtggcgcatgtagagaggctgacaggctgaggcaggaagatcttagttttgaggcaagagtgtgtatggaaggaaaccctgataatagactggttggcctactcttgtgaactccatctggggatgtctggatagatagctgaggtgagggagagactccccacaggaccttaacctgttccccgtggctacggaaatcataatgggcgcagttcagtgggacagttttctacagtcaacacactagtctaaaattaatgtatcgacatgctggctctcatcagtgtgggttttatttttggttgttacaggctgtgcttctaggacagatgggacagatgtaacagatgtgagtggctctgttaatgctgcttaaggcttttgagcattggacatccctcccccaccacttcctctctccatcaaaatagaaagacgattcttctttgtacacgaaaaatggcagaaagttctacagtttgtttcacttaaaaccagcttctgtgtgaagcacatctggtgagggaggtgccaggagctgtactggcataaccaggtgtgcccctcagctcccactcctttggcttctgatgggtagagtgacttgtcacagttgccacttggccttcaaagtataaacacatactttatcagctaactgctctgtattaaccttaagactgggcagactttctccataaatgtctgctagtgaaaactgcaggctctgggcttccactgtagtgtaagagtggcccaaacaatgccaacaaatgaatatagcttcattccacaagaaagttatttacataaccaggagactggctagatctgacctatgggctgtcgttttcctggctgctgttttaggcctgactgactccatgcaggccacatacgtacctcgtctctaagagacaaacttcagtggcctaagctttatgctcaggcaagcagagctctagcttacctttcaggtaagggctgcatgaaccccatgcctagctaggcaagcacaagctagtgtctgttattctatatgggattataagcaagtggaactaatttatggggaaatagttatttgtatgaatcacttcagtcatgttagggatgaaggaatgtgaggaatgtaaaaatgagcatgtgtggatcctaatacggggtaagaagtgaggagtgctggagccacagtggccgctgcgcatggttctcaggagtgggattcacaagcaagggattcaggctttcagaatcacgagttgtttaagtatgttggtgtcccatcttacagaagacagttcattcttgtgccctatcattgtttaaatatacatgatacacatgcgtggcgtgtacgtgtatgtgtgtgtgtacacatatgtatatatatacatatgtacacatacacacatcactatggttatctgcacagcatttcactagacagttaattactcattagcaccgatttaaactgattaattagccagtgacttacagcactgggatcaaatccaaggcccatgtatgctaggcaagtagtctactggttgagcaacattccagctttataatatggatcttaaacctattttatttgatgcttctatccacatgacctgaataatacttgcccagagtaggtgggaatgagtggctaactaaaccctgtgtgtcacacacgtgtggcgtgtggtgtggcataggggataaagcgtgtgcgtacaagctctaacttgactgagctttccatatttccccagaaaccaccatgcatgcagctgcaccctttaagaggaccttcgctgacttggttagcgcagagagatttgtcaccaggggttgtagctctccttggctgcgtttctctgggcttagactgaccttcctctgctctttccctccccctcctcccaggagagtcagtcgattcgagtgggcgtgggttgcttcctttgccatgtgtgtgctggctctggactcctcagccctttcttggctggcctgaaacttactgtgcagaccaagctggtcttggacatgaggcatccccaccccctcagcccatctctgcctcccagctactagaattacaagcatgtgccagcatgcccagtatctttagtctagctgtctttctggagtgagtacccttgtggagctatccacctacacctccttttgatacaggcgcctccaggacaggctgtcattaaatgaattactgttctgttgccgtgattcactcctgtggttacctgtcaacttcaaaaccgggaatcctcgtcccaggtccgtctctgcaccttccatattcacaaatgatgtcacatccagcaggacagcgtctctcatggtcggttctcactgctcttcactgagatccacttctgtttctccttcagaatcagagactcatgagctctaccttcatctttacctaaacctctgtcgctggagatgaagttcactggctccactctgtgtctggaagagaccttcttccagtcctgtgttgtgtcctgtgagttctctggtttggactgaaggcttatgtatttagccctcagttagagctgatttctagctgtgaggacttgtgtgaactacattgtcagtctgcctgtgtgctttcgatctctgaaggctttctatgggggacatgacgctcctggtttgacaagtggtagggtcagtaaaactagaccatgggtttctaattcaccccttccttttctgaacctttaataaggacagaatatatacttttctcatatatttttaaaaaaggtcaaggtacctagcccaaagaggggcaaaccataattggtgttgctggttttttttttaagccttttttattagatattttcttcatttacatttcaaatgctatccccaaagcccccaccctgctccccaacccacccactcccgcttcctggccctggcgttcccctgtactgaggcatatgatcttcgaaataccaagggcctctcctcctattgatggccgactaggccatcttctgctacatatgcaactagagacacaagctctgggggtactggttagttcatattgttgttcctcctatagggttgcagacccctttagctccttgggtactttctctagcttgctcacagtcatcttttggatgtaacacagggcccctaatgaaggtgttgctggttttaagtgctcctgggttccccaaaggctgcaggatgctaaggtactgaggaaagaaccctggcctcacagtctgtgcagaagggtggaggctggctcagtattcttgtctcacagctgctgtgccctgatcagtaacaggctaatactgtgctgtcagaattacttcatggagaaaagtctaagagagcctgaaatgaagacttaaagtcgagaggtgcacccctcccccgttccagcattctttccaagtgagggatgacgaaaaagaattcttagatcttgctcttctagtttctatgagctaatttatcactcatgccgagatgcccagagctttctcagcagtaggattccatctgaagctctagaaatttgatagaagcaaatgtaagactaattagctttggtaatagcacattttcatctctgaagtcatacagctatgtgactcccatcttcccttccatttctgtgaggaccactcccacaaattttttttcccctaagtttggatcatctagaacccgagtcagtgagaccaaaagacttttctgtagccgtgttttatgtgcctgtgtgtttgcatatggcatatatgtatgtacatgttcacacatgtatgcctgttgtatgtaggtgcttgtgtgtgtgtgtatgtatgtgtgtgtgtatatatgtgtgtgtgtgtatgtgtgtgtgtgtgtgtgtgtgtgtgtgtgtgtgtgtgtgtgtgtgtacaaatacatgggaggccaggttgatgttactgtcctcatttggctcccagcttgttttggataggatctctcatggaaccttcagcttattgattcagccagacagcctgcccagcacatgttgggattcccctatcccagccccccagtgctgggactaaagcatgtaccttagagtctggctttttacatgggtgcgggggggatccaaacttgactactcaagttactatggtgagactttagcaaatgagctgtctcctcggctcctcttgccttcggtttttaatatcaatttacccaagtttgaagatgccgggggcattgctagcttctgctgctgctgctgctgctgctgctgcttctggtttctttcacttgaggttggaacttccgcacatgccgtggaagtggactttcctttaggaagtgtctatctaagtctgagagttctgtttatgctttgggaacttttgtttccttttattaagttctgcagatcaaatccctggccttgcacatgcatggtaagtatattgctactgagctatgtccctggcccttttatgttttgagacagggtcttaccctgttgcttagcctggccttaagcttgttatgtgtcccagactggcttctaacctgtgatacacgtgtgtcagccttttaagtactaggactagaatcaagggccaccgtgccttcctggaactcagttcttagggactaggacccgtgcaccactcatctggttggcatggttctatagtaaatgctttgacacagtggatggagtccagatgcccaccttaccttgtttagatgaaatatacccttcagtggtccttgcagtgtgtctgactccctctccagcaagctccttctgtatttatacagtgcctaagcttatgtaatgactaccgtggacaaggcactgtaggtagcccttcacaaggattatctggaggaatttcctgggtaatttatgagattacttcattttaaagatagggaaactgagaaaggggtaggggtcgggggaagcttgcccagatgagcagtggagtccggactataaatccctctacgctatttattcttacttgacagtttgtgttttgagtttgatttctctgtgggatgggaaaaaagcctttgctcccagggacccgcacagaacaatacagactcagtgtgtgatgtccttggatgcccagagcagacttacgaggtaacaccctcaagtatggaatctgtgtgtgatgtatgttttctttccccaaaactggaatagaacttggaacagcaaatatttaatcagagaaaattcctcttgttaaaaccttgttagcctgtggcgctcggaggctgttacctaaaaatacccagcacttactgaaagtaagtgttgctaagtcacccacagagcataaaagaggcttagttaatattggcagcgggggtatttgcccttagtttggatcacattttcaatgccacatacctaccctgtgatgctcctgggtgcctgtggccacagaagggcctgacttgagtaaacaagggaggggtttactgggagtggccacagagaaggctgtacctgccagcgttcggagggagggagaatgtaaggaaggaaaaaggtaggagggaggggaggaggatgagcggtgggctggtataggtggggaatgggccagtgtgcatgtaatatggtgtgtatgggggttagtgaggtggtgtacacaaagtgggaaaaggcaggtttgtaatccaacacttaggaggctgaggcaggtggatcactgttagaccaaggttactctgggttagaccaaggttaccctggggtacaggggagatcttgaaataaaaaaggaagggaggaaaagaggaaacaaagacagataacaattggtattattgacaagtaagtcatggggtggaaacactgggtctgaggttacgaggatttgttgctctcgtagagactagggttctgtccctgacactcacagggcagctggcagttccatgatttctgatgcctcttctgcactctgttgacactgcatacatgtggaatgcagacatacatgtggtcaaaacacccccccacacaaagtacatctttttttttaaaaaaagaaactgtgtaaataaaatagtatagtaagtgatgttgttgaatttcttctttataaatatagattttgcttgtcaatagtactgttcatatcaatgtgactccattagggtcgagagctctgaaacagccttcttgtttgtgggcccattcatattcataaacttttttttgatactcatctacatacctgaaagacacaacttacaggaggaattaatcattttggctcatggtttctgaggattcatagttgagtatctcagcatttctgagcctgttgtgggagtgtgttctcagcctggcaaggaaatagagaaaaaacatacaggagaggccaggccaagatacagtcgaggagaggacgtgaaagattttaagtcagaggcgataactccaaggaaacaggttttccagatacagcggagctgatgcacagcggactcacaaactctgagagcttgcaaactctgagagcatgcgcaagacctgcgccatcttaattcagacaaggccctagcacggagacagggaagtggggacaaagcctcaccttttgccaagaagccgattaaattcatagcttctgggagagggaacgtcagttttcttccatggagaaacactgctcagtctaccaccttctgcagcaggctcagtgctcagagcagttgccacataagtcgtactcagtggatttgtttgcagagaagagatgatgtatagttgagtgggaagagaagggggcaaggacctgggaggaaatggaggaatgggaagaatacaattaaaatgtacgaacttctcaaaagtaaataaacaaaaacacagtccagagctatgccccactcgcctccctactccacctgtgctctgtctccttctcagaactccctgctaataacattgtattaagaatccattgcatcagagtcctcatgagctggagctcaccctcatgcacgcatgcacgcatgaagggagatgcttcactaccaccctagtcatttctcaacctaatcagcagtcaggagtccccatcacaccatggctttcccatatgaagatttgaacccagatggatgctcactcatatttcaacccagcttaaaacaacaacaaaacttagactccattagaaagcactcacatggcctggctcatttcctccatgtgggcacttcctgtgtctttgtgtccacttttcattgctactccaaagtggtgactaggtgttctcactgggatggctcagagccacaatctcaagtgcctcagttacgtttgtgaaggaaatcaaactgtgctgtctctgcctcatgctctgacctttgctggttgtatctcctgtctactcaaacagcagtgtgttcaagaaggactcgttctctctggtgctcacagactctttggttctctctccctctctcccttcccccaccatcttccctttcctaccctacttctcctacctacctctctctggagagactgagaagctgaaacaatgtatcttctgagtgtcgggactgtcgttatctatcaccttacctagttttttatttgatgctttggattgagcccagggcttcatgcacactagataagtatgtaactctaccaattgagctaagtccacagccctaaatctttaaaagaacatcgtgtatatagaatgtgtatagtactacatgtgtatatgtgtgtatatatgtgttgtatacatgtgtatatatacactcttatttgtgaatgaataaaaaatacccccaccaactaagttgatgactcttcagtagagaagagtaacttttggtgtggttatgtaggcagtttctcactttttatgttatatattgtaatattgcaatagaaattgatattgaaagtccctggaataaataaagatagaacagtacatttatccctataaatcttttaaagagtataaagaaaactaagaaaatgtctttatcctttaaagattagaagagggcattggatccactggaaatggaattacagatccctgtgagccatcatttgggtgctgggagttggaccatggtcctgaaagagcaaccgttgagcagccagtgagctgtctgtccagctagaaactctagcggataggttgttcttattcagtcttggtgctgatttgcacatggctgtttttaccatgcatttgactaagactgaacactcacaggcagctcctctcagcctagttctaacaggcaacttttgcatcttctctctcagattcccttttttgaagagttctgtaaaaagactcaagccggtggtgacgcctgtgagaacctggtagggtattctgcggtgtacagagtctgctttggaatggcttgtttctttgctctgttttgcctgctgaccttaaaagtcaacaacagcaaaagttgccgggcctacattcacaacgggtaagtctcttgttcttccaagggtgtcctagggtctgctcgtcctcactgactgacgttctgctagttgacatttgacactgatgtggggaggatgggctgtgtgtcactggtagcctaagagcggcagtgcctggtgccataataagaaattcagtatacacagggagtttattgtttctactagggtcttcccctgagtcatttccatcctaccgtgaagaagagttttatacaatcagaggccattccaagtgtgcctccttatgggaaaagccactctgtggcactccatcacttccccttgatgtgggaagaacactaccaacaacagaaacatgagctagcaggcggccttacaaggaccttttgtcgcctttgagtatcatttgaatgtctgcctttctttctcttcccagcttttggttctttaaattgctgctgttaggggccatgtgctcaggagcgttcttcattccggatcaggagacctttctgaaaggtacacatggggtattttgggctacccagttactttgttttgacacatttcataaaactcttcaaaaacatggtctagtgtctttgctattttgaactactgattcttttatgagttgaagactgtccaggtgttgggggtttagcttagctgtagtgtgcttgcttagcaagcacgccctggcttggccccagcagttgtatgggagctttgtaaagcagctttacctgtgtgcactccctcccccctttcctcctcctctgcttacaaggagcccgtgagaaggctctgttcctctgctacctaagcaattggaatgataagcttactggcttggagagtaaaggaggtctttaatatttacttgaaaacagatctggcacatcagatccgccactcctctgccgtggaagagtgtcattctctctgagtacaaagcagacctggcagcatgaaactgttgttagctgtgagaactggacaagggacatcctccagtctgtgtccaaactcactgtatgtgaagttagacaccatttgagttgcagttcttactggtgtgtaatacagagccattagtcatatccaaagcagggctccttccaagggaaagaatgggatgcccttttctgagaacaggtaagaatggagatgggatttaaattaaagcgggtcagaatactccattcaacccaaatagattgacttttctagtggagatgagggtcgcaggtaccaaccacacttcattacatctttagggctctatcagtttttcatatactttaaaaaaactggtttaaaaagtctaagtcttccttttatctataacactgttaactagtttttatttattacgaagatacttcatgtatattttagcatatcggagctattatatctatagagagaggtgacctaagagtcctcaggtcagctctagctctatcttattataaacagcctgcgacccacacggtggggttcatccaacagtttagggcagagccaaaaaagccttgaggccttgacgcttaatttccatactggatagccaaggctcattgccagtaagatttaaactgttgatttttctagcagtatttctttttgcttgtgaatcaggccactgtggattgtgtaaacccctgcatctattgagacagctgttagttcagcttgaggttcagcttggatgctccagggccagactctgatgccccagtcctagttgtgccctttcattctagagtgtagttcatggtggaagtcaagacagcaggagtttgaagcagctggtcacatgcctagggaaaaaaaagcaatgaacatctgtttgctgctcacatcactctctctagtttatagtctagactcctctgtccaaggaatggtcctaacaagtaagatgagtcgtccaatctcagtgaacataatcaagataattccctataagcatgcctagaggcccatttctctagtgattctagattctgtcagagacagtagctgtcaaaccagctcacacagacttgcaggtttatctcatgtttatcaagtgcgtatgaggttagcatctaccttgtatggttgtatgggcatgaagtgtattagaggaatgacgagcacaaataaaaagtattgttctttggagttgaatgcacatggtgctcacctctctccctttgggtggtgttcttttgcagtctggcgctatgtgggagctgggggcagcttcctcttcatttgtatccagctcctcctgattgtgcagtttgcacataagtggaacaagaactggtatgtgctgttgtggaaagctctcactcactgacttgaagaaactgtctaccactgacaaaggattacactcccactccgtgtgggtctttccattttctcctctctggtactattttctgtcctctctgccctcctgtcctgctttgccttatgtgcctggctgtgcgcactgtgtggctggctggccatgtggaccatgtgtggctagctggctatatggacggagtatgtctggctggctgtgtggaccctgtgtgactgacttgactgtgggatgagtatgtctgtaccttggacggtgtccaggttccactcctacaaggttagaaagcaaaacaagcacaggcagcacaatgctttggaacaggagatcttctgtgaagagtctgggattgagatagttctcttcttggaaaaaaaatggtttgtctctactttctaaaacatacaggatccctttattgggaaaacttgcatcctgctgtaagggagctgtcttgcctgtaaaatggtagccttttagtgccttggaaacagcattcgcatccaggccaagagggaagtgcctgtcagtaacaaccatccagcccctctgctgaggccatgttgacactgaggtgctgagcaaagtgcttcattgctctggtttgtttgcttgtctgtctgtctgtctggtggtgttggtgatttatttgggtctcttggataccaggtaagtgtttgccactgagctgactttatttttcaaatagtcctcttttatacccagtaaagctattacttttatgtctgtctgtctgtctgtctctgcagttcaggctggttgtaaattaatgatcttccctcttctgcctccagaatactagaattctaggcatatataaactgtggctgccattttatagatttttctaggtatcattttattctatattttggcaaaaaacaaacaactcacaataatgctgtatgagtatgcattttcttttatgttgagtaagataaaacacattgtccaaactttttcaatactttttatttttaatatattcttcagcttgaacattgttctgccctttttttcttaaagataataatgagatgacatggtagctgtggggatgcatcagtggaaacagtgtagtgacagccatgttattactttgtgaatattagattaagtacagctgagtaggaccagattttaaatgttggggctggagagatggctcagtggttcctagtgcatggtgttcttatagaagacccaagattggttcccagcacccatatcagactaacaccttcagcgccagcagataattggattctctcttgtagaggtgttgcgtgtgtgcgtgcgtgcgtgtacacacacacacacacacacacatacactagctcaaataaatctttaaaactgtttacatgctttggtgttttacctctgcaattacaggatttcaggttgacgtgtgtccttgtaagagatagtgcttgctctctacattttgagtcacctttaaaacgatgctgtcatctcttctataggtcaagttttgaggtggtagagttttcttaaagatcagctaagggttgtaagcacatgccactgtgcacagctttttaggtcccactcagcctctcatggtactaaggcaagcactttcccaactgagctacctcctgagcccagcacagcttttctttccccgactttaaagatttattaaattatgtgtatgggagtacttacatgtgtacttactaaccccttttttgattctcctatctgtgcagaatgggtctctagttgcaggtgggcaaggagtcggcgaatgacaaacagaagcaacacagagagtgtgtagaatctgagtgtaatttttcaaatcgaacatcaaactttttatactgaagagtaacaagaaaccaggcgagacacatctgctgagttactgtgacacaatacaaaaggaatgtatacatcaaaagatggcagggaccaggtcttatttaccactaagatgggagccaggtgtaatgctagtctattgttaagcccaccaccaggggttcttagtaaatgcttgatttatgctgtttctttgggcctagggaagaaacctgtctcaggggaattccctaactctttcatggtaaatccatctatttgctatgccattgtgtatattcccttgtttgggtgagactggctactgtcctaagtaatcactctgcagaccagccctgagctattccagctccattctttgtaatgcctaattagttttgctgtctctactagaagtaaatttgaatgttactgaataggtaacattcttactgaattccaagcttgtcaattcaaggattttctaggacgttggaacactggtggaggcttacctatgtcagaattcaatctttaaaagcacttataataaaacaatactgaaagagatcacatggatccatacaccagactaacatggggatagggtatgagtatacgggttatgagaatgccaaggttccaggaggttgagtttccttgaaactctttgcctcctgagtgcttccaggcctctcagtttgttaagcaggcttcactggagtgggcgtagcacatgtcagtgcaggtacctctgacattggattcccaggagtgggagttacaggcatgtgtgagcctcctcatgtacgtgcttgggactgaactcaggtcctctgcaagagcagtaaatgctcttaaccactgagccatctctccatcccctttccctgattctactcactgtatttctcccttagtatttcttcagtttggagaggtggtcctgatgcaggctctttttttttagcacaaagagaaacatactggggctgaccaggcttctgcgagtagagctgtttgcttctcctacaagagaaggtgatctcagagggactgctggcagaacatggaaagacggagaaagctcacagccaactctactgagtgatcatctttacctcatacctcagtgcagccactgtgtttcccagggctgctagcatcagagtggagaagtgctgggctaaagctgatggttgtcctttttagttgatgaacatgcttgggccaggagaggagactcatgtttagaaataattctaagccagtgaacctgcagaatttttggaactttctagctgagataagagtgtaatcattgttgaaagtgtcttaggctctgtggttccagggtctctgctggggctaatcccagtatctgaaggatagaatgctccagagaatggggccttcactgacctgtttttctctcccttccacctcacctacttctttctcggagaaacaggactgcaggcaccgtccgtaataagctgtggtacgcctccctgtccctggtgacactcatcatgtattccgttgctgttggaggcttggctttgatggcagtgttttacacacagtgggacgactgcatggacaacaagattctcctgggagtgcacggtggcctatgcgtgctaatctctctggtagccatctcgccctgcgtccagaatcgtaagcatggtttttttctttttgtttttcctttgtgaattttaacaaacccagtaggtttctttagaagcccaagtcattctttaacttcctgtggatgggactcagcctcctcttcatactccatgcccatttggaggtaataactagatttacttgttatccaaaaaaatcggaacttaagtcaataatagatagacagtgcacacagggaacctttaagtgggaaatgtgcttagtctctgttaagcaagagatgtataaattcagcttattgtgtccttgtggaatttggatggcaaggctcagagcagctgtatttgggattgtcttaggtgactggcaacctgactaagacaggaagcgggaaatcctatcctggttgcttccagtctcatgaccagagtgtacttactgaagtcagcagaactgtctgatcttggccttgctttggccgttgttgagagccacaaatgcagattcagtgggggttgaaagcaccttagaaagtggagctgtgaactgttactaataacctatctatgacatcttaagcaagtatgctgaagacatgctgtcttcagaggtgtaaaagtgtccccagtctggtgttgattgaaggatcttactccatgggtgattgatctacacgggccattccaagttctggataggaaaaggaaatatgggcaaaaatggaaagccccttcgaatctctttccaaagtagtggatttgaaaagctgggcacacctgtgcattcctgtaagcacagtacgtgggaaatggaagctggaagatcggaggtttaaaggcagccttgactgcataggtttgaggccagcctgggctatgtgagactcctcccctttaagggataaggcagcagcaagtactaaatcattttagcaggactaagatattttccatactaagtttttaaccacattacagaaattgatatgattattctcctagttcctgcaattgatcagtttgttcctaaaacaaactattggtaagctgaccagaatcttttttgggttaatcttaccttctgaaacagccacaacattttgcttaatgacattagttctgagggtgtcttgttcccattgcagagagcaccattatgatagcctgttacagtacttctactgataattattattgaataatggtaaataagaaggaatttaactagaaggaagggtgaatcctttcctgtcagcaagtgttgaaaattttagcaaagagagatcccttatccctagattccatagttgctccagatgatcccagtactgagttatcacttaaatattgtactttaagtccctcccagtgaatgtctgtcccatagcttcccttgttagcctaaaccaggttttgtacttagtgtggccaagaatggtttcatttttggtgggatttgttttgttttgtttttacctcttgacagctcaatgcttgtgcttcatggattgtctaaagaccttgtacaacccacaatgaatggtctgtgaaatttgtctattgcaccaaactaaatgatgatggctattttctttttctgatcttgtgatttatgaactaatgttataaatttcatagggagagagactgacagaaggctcagctagcgtaggcgcttgctgctaagtctgataacctgaatttagtcccttagacagagagaactgactcctgcaaattattctctgacatccacacatgctatggctcttgtgcacctgcatgcacccatacatgcatgcatgcatgcatgcaattgaaaaaccactcaggggtctaggcagtatgttgaatatgttacaggttttggagagttgtttatggagaagttggacagattttggcatctttaaaatagcatgaatagggcatattccctacccaatattacatttttttttcctgagacaaacacttcattaggttcccctttctttagtaaaggtgagtgtctaagtttaaggagcatcatccgttggctgagggttgcagggagggtggtggtggtagggttctatttagggtataatgtcttactgccaggacttcaagcctgtcttctgtctgtctctttctaggacagccacactctgggctgctgcagtcagggctcataagctgttatgtcacctacctcaccttctcagcactgaccagcaagcctgaaaaaaaaggtaagcagctctgttcaagagtgtgtgctcacagtgcacatgtctctgttccctagacctgaactcttactgagctatggagggttagagaattcaaagaaccagggttttctatgctttgtcattaagtaaagcctttaacagcaaaaatgaaattttctcctcttaaaacatttttttaattttgtgtgtttgtgcacatgcttatgtgagtgcaggtgccccaggattcagaaaagggtgcctgatcctctggggcgtaattgcaggctactgtgagcagcctggtgtgggtacaagagcagcaaggctccttaagctctgagccctcttcccagcccccggcgtgtattgagttttctggcttgcagagaagagtgaccagagaggagcttcagcagttgtctttaggcctccgctgcattctgtcattctgctctggcaagaaccactttattttagtgttttatcggcttcgtttggttttgaatttttgtttgtttgttatgtttcctacatcaggggtttattctctgacactgagagaggtgggaggagcgaaggtgagggaaacagaagacagtttgaacctggatctgtcactgcctgacaggcaatcccagtgcttgccctagatgacatttatttaacagcgacagcaggatgtagagaaaggaaccagactgcctgagctctgttctctgtgtggttttcatgctgtgaaatgttcatggtgtatgcatcagtcagaacagtagttggcacatggcaggtgcttgtggggtgtggcctgttattagtgtgaaattgttacagtgatccttttgaaggtttttttgaggcagggttatatagtccttgctgatctagaactccctatttagaccaggctaaactcaaaagcacagaaatccacttatctctgttcccccccacacaagtgctgggactgaaggcatgtgccaccacaccaggaaaattttaatctataaaagaagtattacattctagagtcccaaattttcatatttatattttatctttttcccttttgtgatacataaggtgtacatatatatttatatatgcatacaggtatatgaatgtgaatgttcaggaatctttgatccgtacatcaagtaaatatctcaattaaatagaaaataaaagttactaaatttaaaaaacaaatgcaataattatttaggtataggtactttttattggtctgtcttgttttgagagaaggtcttactataaacaagttggcctggaacttactatgtagcccaggctgtgcttgaacttgcagtttttctaacttggccgcctaagagctgggattattggtgcacgccaccatgttcagctggggtctcatcttcatcgttgtagtgggaagtagtagatggaggttttatagtaagtatggcttatcccaagtttaattatacacataaaatctcaatcatgacccagcttaccccaggtcttaaaattttcttttataattgcttatatattcatctctggttttaagttaatggaagttttgttcacagtatattttttaatagcatgtattgctttaaaaaacagtaaaacatttatttttaattttaagtagtaaatataaattttatattttattcatatcttacaaaaatcattccactggcctaaaaaagaaagttttttgaagccacagctaacaaggttctattaactctttcaaagtgaactccagtgatattctagtttagcttcaaacagaatgtgtgtttgtagaacaattaatatatttccatgttttgggttcaaattggcaataagatgtagttagatactcacaattgaagcatcatgtatttttaaaaaaagcaaattgctagtgagagagatattatagagacatttctttgaaattttagactacctcagatggttcccaggtcacgggtcaagggaagccatgtttcttatgtctgcagtaacctgtcttctctggctcaggaacccattaccctgtctctacgtgggcttcccaccaggggactgtgctctacccctctctgcagaggctttggatccagtttaaaaaaaaatcatcataattaaaaacagtgggtttaatgtaggagaagcaagggtgactaagtcctgagtcgtccgtcacacccttgaaggcttaactagaatggggatggggctggcccttattcctcatgtgtgctgatgtgggagagcagtgtcttggaactagcaaaactgcagtctgtgcagcatcagactatagagtagaagttcccagggtgaagggctcagtgttgggaggagtcatgccagcacacttgaatcttcccagacagatgctgtaaggtacagtagatctttgtctaacgtgactgtgtttgcttcgtgttatttacaagtcctggatgaacatgggaagaatgttaccatatgtgcgcctgactttggtcaagacctgcatagagatgaaaacatggtgacttggctgggcacccttcttctaattgtgtgcatctcatattcatggtaagtcctaggagttactgatgctcagcttacaggttttagaatgaaaggaacagagttatttacgtttcagtccctgtccgtaggagaaaactagccagaggcgcagtgttgctgcacagcctcctatgagaaactcctgtgctcattactccactacaggggcaaactgaatacatgcatgttttgttaaaaggcagttttgaagacgagttgctatggcatcgttgaagagtaagggagcatatagtgagaatgatgaaaatgtaccacatgccagagggttctggcaaaactctaatccaaggggatagcgtttgttttgttatcggtggagagaaaacctgggtgttctgtgtatggtccagttacgccaggaaatgttccttctccgttgtgctgaaacctgcaaagctaggaagtaggtaggcaacattgcccaggtctgtgggatatgtgtaacggaagcccgttgtttcaccggcctgtgccagaggagactccactttaaaagcacttcaaagatccctggagggaaaagtcggtgatgggtggttctgggaagatattttccggtactgaagcttcatttggacaggagccttttcagagctgttttacttcagtgtgttgtatgttttgtttctctgtgtaagaaattcaacttgtcatgggcatgctatgattttcctcttgctgaaactaaacaatcatggtggtgacagactgtgtaaacacagagtggaagagcactgacaggctctctaacagtcctgctgagaggaagggccagccagtaagggcctccacactgcaaagggcttactcagaaccatgacctagccaggaaatgcttgctcctgtgctgtgtggctaaagtactggttctctaacgaggatcctcagtctgcctgtgccacctgacagtctttcccttaggtcagaagggaccttggtggttgtcccttctgacacttaattcttcacttgtctacttagtacctgctatactgaaacagagacagttgaggggagatgtctgaatcagtaaagggcttgccgtgtaagttcaaagacctaaagtcggatctccatgcccatgataagagctgagttttgtcacccacaccactaaccctagtgctggggatgtccacaggtgcagtacaacttgatgaccagccagtctagccagtaagcttcaggttcagtgagggaccctgtctcaggagagtaaggcagaaagagattgaggaagatacccagtatgtgctggcctctccatgctcacacatgtatgtgtgcacgtacacacaggcatatacacaattaaaaagaaaaagaaacagtgaggggcattcaagtccatggccatttccagtgatccccagcctcatgcagccactttcccctgctagctagttgattgtcagcttgaaacaagccagggtaatctgaaaaaacaaacaaacaaacaaaaaacagaatttggagaaaaatgacaccattggattggcctgtgatccagccttagttgcattttcttgattaatgattgatgtatgaggacccagtgcacttgtggccggtgccatccctgggcaggtagttgaagtagaaggcaggctgagcaagccatgaggagccagccggtaagcagtgctcttccatggcaagtggtgctcctgcatggcaagcagtgctcctccatggcaagtggtgctcctgcatggtctcagctccagttcttgtcacaagaaatctgtccaaggaatctgacaccctcttctggactctaggacactgcacacacatgctaaacagacatgcatgcaagcaaaactctcatgaacataaagttaaaaaaataaaaatctcaagaatattggtcaatcaagagcgaagtaggttataaagatcattcctttaaaaacattcaaatacacttgtgtttataaaaattcccaggaggggggattggcgaggtggcttagtggttagagcacttgatgctttgcagaggatcctgggtcagttcccaactcccacatgacagctcacagccatttgtatataactccagtcctactgctttctctgtggccacaagacatacacgtggtacacagatataatacataaacactcatacacataaaataaatcttttaaaaagaagcaaacaagcccagaaacccccaggaggagacagccagagttgtggtagtagtggcattagagagaagtgacagggtttagatttgctgcggccatcagtgggaaagagcagaatcctactgggtacacagcgtacattgacagtagtgggagtgtctcacagtgtggactatttacccattcagattttttcctgcttcttagagttgcaaagactcacttttacagctaggcatatgggtgcatgcctgtaatcccagctaatatgggaggctgaggcaggaggattacaagtgtgatgctagcctcagcaatttaaaaaaactctagttttatttaagtcacttttaggactgggagtgtggctcagtggcagagtgatgcacacaggtgtatgcacacacacacacacaataagaggaactcaagtcaaaggccatttccagtgagcccataaagtcaccatgacttagcacagcctttgtgaggatctgggtttaaaatacccaacccacccaagaaagaaatcacttttaattttgtgcttagcttagtggaaatgaatttgcctatcattctgtatgtataaaccctaggtctaatccatggtgttataaaaacaaaacaacaaaaaccaagcataaaacagaaagatcacattttcaagagatagtctgagaattgcagcatcacagtggagattgttagtttgatattccccaaagacattaattttcaaagctgacagctgctatttagaaatctgtctaaatgccaacagcagacgttttctgaatgctggtaattaaactgcagaagtgtaatggccagtggaatgctgggacaaagcagcagcctgcacagagtataacctgctgctcgtttatgcttctgtagcacataggcttgaacgcactctcaggagttggctgagcatcacgtgggggtctggagattgatgcttactgtaatcaccccttgcagcaccaggaggagtcagcttggagaatgttataaacaaacggtttggcatctttgaagaaaggacctgctgctaagggaaggccccagtaacatgaaggggttttcagctatttccagagtttacataaaaggagcatgggaggctggggaatgttctcaagtgaggccacactgtctgcgtagaagctgttatttgaatgattgtaggaatgcttaatttcttggtggaaactgtactgactagaacaccagattataggagaataaattaccagtgttccatgtaaaacccaggattgtctgcggtgacattttgtaatgtcattttgtaataaaaagcttggctcccgtggctcttctcagttccctggaggatccttgtctcccaaatacttccttgggtgccatgactgccctgggtcctcaggcgcttcctgagagtacacttcctctgtgctgaattctctctctggcctcgctttctggcaatgctctctctagaacccctgtgatggaacatcccaggaccccaagagagctcacctgccaaagttccctaagagctggctctattgatccagctgaaacctgtgacaaagtccagctcccaaaggcctctaactccttccttggactcgaggttggagcactattttatttccagctgaacctgtcagactggacaggaccctggaggccttgtgaagaatggagtatgttcctacaactctgtacctcagcttcaggaacctcgggctgagccacctttgttagccatgtggagagatgacatttacatagtgactggtttattatcattagaacaaaacacctgatcaaaaagtcttaagggagaagaaatttatttcggctcatgatttcccagagagtcccagattgctttctattactgtgataaagaccatggctataccgactagactcaggtagtcatttggaaagagggagcctaaattaagagactgccctcatcagactagactgtggataagccagtggtgcgttttctgtatagatgatgacatgagaacttattgtgggcagggttacccctgggcagtggtcctagggactataagagcaagccctgaagaacaaggtaatgaggagtgccctctacacacgctcttgcctcacactcttgtttgagtgtctcctgcccgacttccctcagagataacagtgatctgaaagctgaaataagcctttctcctccaagttgcttttgaagtgtgtttatcacagcgatggaaatgtcaactaagacagtgaccacataagtggagaaaggggtttctttcaccttacagcttgcaacctgtcaaaagaggagggcagggcaggaacacacggaaggaacctagaggcaggagctgaagaagagaccattgaagagtgctgttgactggcttgctgttcatggcttgctcagcctgctttcttgtactacccagagccacctgcccagggctagcaccacccacaatgggttgggtcctcctacttttaccaatttaagctttgcgcgctaatggtctttccagcccaaagttcctaatattttgcaacccttcccagatcaggtctgtcacagcaatagccaagtctttggtgccaatttctgttctagttgctttctattgtgacagtgatcaccccaaagatgctagggtgctaactaagctgggtgacctgcataattagattattaggaaacatttgttttataaagtattccttggctattttcatttagttatgcttaagagaaaagaaataacctttagtatttaagccacctaggaaaatacccattgaatataaaatgggaaagctaagaatctatattaaatgctgagcaacttcctagttcaaaataggacgctcacagcagtacagcgtgccatgtggaacaagggggtatgctgtgctggtaaggacggttggcttaagctgagaaccaacggcatcctgaggagcagtgttctctctgcacagtctgggcctgctgctcttctctaaggagaaaggaatggcggtcatttgcttttttattttagaaatcctgccactgcctcagcagctagccagaactctccatgtctatacatcaggaacgtgggctggcctcctctggctcccacagaattctggtcttctttgaatcactaatcacacagctctgtgggaacatggttgccttttgtcacacaaaaggcatggggtgtgtcccgggcctgccctgtccattttctagtatgaattgaaaggtctgtgatctccaaaagcaaattgggcattttcttggaattttctgggacccgtgggacttcggctcactccacagtgaactaaagcaggtgctcaggtggcgtttgcgctgtgcacgatctgacgatctgacaatactgcagaggttgggtattgcaagggtttctagagagaggggaaggcaggcagtgttttggtgaatatgtaaataattacaaggaacatctgtgtcacattgcaatgtgatgcagctgttttctgaatggtgacagattgcaccacttggggctgttgtccctctcctcagccttgcttcaccacagattatagtgactgacatctgtaatcccatcactcaggaggttgaggcaggaagatggccacaagtttaaggctagtatggactacatagtgagtttcagaccagcaagggcggcatagtaagactgtgcctagaatgaatggatgaatgtgtctgggagctgactttatgggtaaactagttaatatgcaagcgcaaagacctaagttcaaagtcctagaactcagtaaaatcggacacatctcgtgcctgtaatcccagtcctctacagtgagacgggtgagggagagagatggggagcccctggtagctcaacaggagacctggaaaatgggagaccctgtctcaaccaaagtgcaggcaaggacttatgccgcctctcccttcacatgcactcagtgttacacacatacatgcatattacagagacacacacagagggagagagacagagacagagatggggggcactttaagagtttacagaaccatgtttttgttaataattctcatgagttttatggggatagtccttttactgtggttgcctctactctgcataaggacaagactgtccctacggatgaagtgaatgtaaatagtgttagacagaaaacgaaatcctcccccattttagtgccatctggtgcaaagaatgaggtgtcaaaggtgcttgaatcagaaggtttgtcttcccaaaactttattccaaagaatttatggagtagtgatggaagtgcttttaaagagttttcctcaatttccagccgaaaacttcagatactaaaattaaaattttgtctttccccaaggaaacttcctactgtactatagtataactggcatgcagaagtcttgagtgcataaccagatgagagtgttcttccgaatatggccagtgggaagtttttgtccttcccttaccagtcgggatggagtagaagaattgtggattggggtctggatcccagaggacctctttttctattgctccccatagcccattgataccttttctccttgggcaggagactgaggggacagacaaggccctgctgcttcctggttgaggctgacttgatggacatgaatcttaatctctgcctgtgcactaggagcctaaccgcatgagcagtcacccctgtgtcctgtgtcctcgtaaacttgcttctttgtgagctacattttcacagacgaggccctgaggctcagaacaggggctgccacacgcagcacacttggcctttagggattatctgcaaaatgcatgtataaagttaggctaagtgttgaatatatgtttgtttaaagtgcttccatgtttttatatatgggagaaatgagcacttttaccattgtcagtcaatgttacagattgttttgcctctctagatatggaggaaagatagggaaagattttgaaacagggtgctgtgtaggccaggctggtctcacattcattatgtagtcgaggatggccttgaatgtctgatcttcatacctcttcctctcgggttgtgattacaggtctttataaccacacacagtttatggggtgctgggaactgaacccatagcttcgggcatactatgcagtcactctactagccgagggacattgcctggacttaacaaaacaaataacttttgatctctaagtgagactggagagtggggtggtgataaggtaaaggtagaacatgaggagcagcaagaagccttgttgagaaaagactgacaatatctgcaaacttgtgtctggataaaatgatctagagcagtgtgcttacaaagatagttgtggaatccaccatcaagcttgctgtcaaatggaatatcacagtagcttgtgttcatccttcagtgcctgctgtgaggggactggctccaggatcctacacccctaccctatgccatcctaccctgccaccgacaccacgtcaagtgcttacatatcgaatggtagaggcagaattctacataagctctacgtacatcctccagatgtgctaaattgtctctagatggtgtgtttgatatagtgcaaatacagtataaataacataagacatcattacttaggaagtaagagcaagggagaaaaacagacgcacccctgcccacctagacaccgttatgcaaggttaaataaatccacagatggagacacttccatcaagtgtcaacgggcagggcgggagaggggcgcccagagctgagggcacggggagccttacaggccgctttccctccactcagatgacagcttctccctgtgctcttgcactctgttctctcctagtttgacatcgacaacaaggtcgagctcggatgctctgcagagtcgatacggagcgccagagctggaagtaagtgcgtgtccttccttctcttccggcttctgctcagggccctgttctcaggagagccttttgtgcatttgttttttgtttttttgttttttttttgttgttgttgttgttttttttttaattaaaagtaagtttttcatatagaatattccaatcatggtgtctcctcccttctctcttcccgccccccacaccctttatccacccaatccaactccatgcttctctctctctctctctctctcacacacagacacacagacacacacacagacacacagacacacacacacacacacacacacacacacacacaccaggccaattaaaacaaaaatccaaagcaaacacaggaaagagaaaacacacaagcaacacttagacacttgtggagatgtccgtggtgcccgtatgtatactaagcctatacaaacacagactcagaaaggctaacaggtgagccgtgctgaataaggcaggaaatgctcagatgaggcggctacacaaaccccattgagcttgttttgtgttggtcatctttgcctgggtgtgggcctgggcaggagataagtataagtctggcttgtatacccagtgagaagactaattttcctttgcagtgtattgattttttttttttttggcactcatagttctgtttttctgtctaagaaagaataagatttttgtatacaaaaagaactattgtcctatgtgttaaaatgagagaactctcaatttttcgtcaacagtgttgccactggcttggcactctgcacccaccccgagtctaaagctcggggaaccatgttcagccaccccttgtttagtctctttggctgtaatggcgtaggttttctgtcagttctaaaccacacacctgcttgacgcccgtctgcattccccacgtgcagcgtagctgtggggttatgtatcagcgctctggaggaagacacaggcaaggaagagagccaagcacgttctgcacacactgcacataccgcgggaacgctgacacctcagttatgggtcagttccagcacacacttgtcattcagtgaggaactgtaagcgtatagatcaggccattcacctccatgtcaaggtctgagggagtgtttagctcactgtcaaaacatttcctgttttccctttcctgtgtagaagtcttttttttttctggagctcttggtgaaacatgaaccatagtcagaaaactcaaccatacaggacagttaagatgagacttggcagccagggtggcggtggcacacgcctttaattctagcacttaggaggcagaggcaggaaaacctctctgtgagctcaaggctgcccagaacctggggctgcagtgactgctcagtcatttagcacttacaggtgctgactgtctaaagccgtgtagtttcacatcgtcctcacaaaagcagtgttccttgcatttcacagagggaagagcattcccatttcccaggatgggcccttgggtacgtgttcttgactgcgcattgcctgggagcaccactgctgtcccagcccctcctgtcccagtccctgcagctgactttgctggcgtctggccactggatccattcaaatagcatttactggacggacaagccctggtgtctttccagatatggatgggcacttggctctgcagctggccatttgggatgcctttccagtgcctagcctagagatagtgcaccattatgaaggcctgttatcctgccagcctcagaatgcagaggaggaaactgtgctggcttgaataggttactgctgtctgttacagaggagcatgctctgcagaagccttctttgtgcctttgttcctaccattgactgggtggccacctgctgggggtgtgagcattatggtttcaatgtctcctttgtgtacagccttcaagctcaaacagcagcaagtccccaggttagatttaagagagaaagttgttctcctttgagggagaagccgcccactgtttgcttctaagcaagtgggttcgtgcccccacatcattgcctatgaaagaccaagctcatgttttctgtggtaacttaagcttcaaaagaaacgggaatgaatagagtgggcccactgacttctgaactgtagactgcctcacagcatccaagtcttgtggagcaggaggaagcaaaagctccagcgggacttgagggatgaaaggctgtgttctcctggccctcagctctggctctctgggatttttgtagctaagccctattccatagagataggaaagaccattgcttctcagatggtcttggtaagtgtagtcattccgttctttcttattctgtttatcagtcttcctgcaatcatgtaataaactttcataattttgtctctttttctttgagcttactgttttgaacaagtaggaattatgatataaaattcaaaatgtactaaagaagcaagaattccagccttctgtatccacagccagatcagcagcctgattgcttattttgtttgatttataagaaaggatctcactacataacccaggctgactgctttgaactctgcggctcctgggctagtcttgagttcactgcactgctcggaccatccattaacttgggattcttctacctctgcttcctgagttaggacaggggtgcagccattcccgcccaccagctgcctctaatctgcccttcagatttatcccattcccagttcagcttgtcagcttcagtgccctgagtaatcacgaatcccaaggtctcgttccgcatgtgtcccagctctttttttttttttaagatttatttatttatttattatatgtaagcacactgtagctgtcttcagacactccagaagagggcatcagatctcattacggatggttgtgagccaccatgtggttgctgggatttgaagtcaggacctttagaagagcagtcactgctcttaaccactgagccatctcttcagcgccccctgctcccccccccccccccagctctgtcttaaagctagtttatgacttctggctgctgtttaatttgcctgatttcactgtcatccgttgtgagcatgatcgtagtcccagcccctgaggcagaattgatgagtagcaggcctcacactaggaagtgtgaggcaggagcatggtctcttttgctgcatgtttcagtccaagtcgtgcagaggtaggaactgaaacagaatgtctcagttggtaatttattagaggtcagcacatgcagaagagagaaaggagagaggaaggagacagaattaggcacagtataattaaagttaaaagacattataggctggactaagcccagggcatgctcccaagcacaggtggtacctcagagtgttctacatgtcctgttagctgggcctttatctgccttccatgatcagtcatttgatggaggatacacagaagggcctgctatgggacgaggcagctgtgcagccaaagcagtgcctaagtgagctggctcacaaggatttgcttccagaagtcacacaatagctagctagggtgagcactaggtcctttgaaggggacctggctagaacatccccatactcttgagggctgtccctgttgctgtacctagtgtatctggggacagagacatagccaaatctcttgcactaacatgtacgtctggtagaagcttttccagtcgggcggcatacagtgctagggacgtagaaagcagcatttgacttggtcgcttttgttctcacaggtagcccggtgctgtttctgctttggtccagatggagaaggtacgtgttctgggcccgactgtggccctgcaggctggggtttctctctgtaggcatttgccgttcaggtattactttggtgcctaactctgcttgttccagagctggttaactgtctatgtacttctcacatctctctcagggttttgtctgtttcattggtattctggcagggaaaaaccactgctcactttggttcttatctaaggtaaatgagagttagaaaatacaacgtgtatatgttttttaaagggatgataagaaaatgcaagaggtccctacatctcatttgggagccatttcttttcttcagcttgcttttctttacagaagggaaagtttatgggctgctctctctccactgagtttctaatattctttatgtcttcgagggctctctttctgctgccccactggaacgtatttgctaactcatctagtcaagcaagttcctggggtaacagagctataagtggcctttgtggctttttctactagcagcacattcggactgaaatgtgcacgcagctgcagtagtactgatcgtatgtggactcaccactgcccttgggcatcctttgtcatccacagacactgaagagcagcagaacgtcaagaagggacccagggtgatttatgatgagaagaaaggcaccgtgtacagctactcctatttccacttcgtcttcttcctggcttccctctacgtgatgatgactctgaccagctggttccagtgagtggcctgttcacagccttgaacccagctcagtgggacaatctctgtatagtaaaataacacaacaaaacaaaacatctcagtatggttctctaaagagtgaagtcaatctgtactctccttagcctttgtagccaacccctgacattcttcctggtagaccagaagcctttctgagatgttgagtgtactcactgcagttaagttgaagttcccgggagcggggggggggggggtgctcagaggcagagggtgagctcaggatgtgagagaccttcagtctcaaccctgtattgagaaacagaacaaacaagacaggaagggctaagtccacatcgcaagtgtggggaacactgtcatagcaatagaagaaagattatcttaaagactaatacagtggggttttttcctacttcaaaataggtatctcttatttttccagtttttaatttaaccaatgcccaatggatttgagttttcctacctggagattcatgcagccccagactcggagtcatatgttgacgtgtagtttagtgtttgggtggctcttctgtgctgcactgagatgtaagctctcgtgggactggctgaccatgagccacggcgcttgactgtcaggtggtgagagctgaggaggaggctgtcagggaacaggagctgcagtctagagcctagagttagcaaacacttccgggagggcattcttcctgaggaagggacaaatttgttgtttcctagtgatcttttaaaaactggaggaattttggcttgaaacagataagaaagtatggacagagccaaaatcataaagacgagatggtaataaacattgaagataggtagaaattggagccctctttacattgctgataggaatatacgatgaaaacacatttgaaaatataatttggcaactccttgcatggttcaacacaagatcctagtgtatagtccagcaatttccctcctaagtatagatctagtacaaaaggaaaagtaaccaaaaattatagacatatgctcatgtcatagtgattcataacaacacagaagtcaggggtagctcaaatgtccctaactgacgaagagagcaaagcgagctatttccactcagtaagataggatttataaatcagaaggagtgatgtacagtgtgtagccccagtctggaaaccccaaaatgttctcagatctgacaagacatggaaaggttaccatttccaattttggatttgtttacctgataacatctatttaaatattctagagtgaaaaactcttaaagtttggtctcaggcttctcagccaagggacacccatcagtgctgatacacatacaatgcacagagctctggaagcaacatgctatgtttaaaagccaatcataggagactgtgtgactgtgtttacatgaattggtctaaaaaagacaaatgctatagacaggaagtaggtaaatggatgcggggtgacggaggacatgggaaggggagcagctgggggatgcaggatgtctgggaagaggaagctgttctaaaactgactagcaacaattctataagcctgtaagtattggagaagttggcaaatgataccttttaagtgtatatgagttagaactccattaattactaagaaagaacgttgaagtgtgctgggggccagcagtgccttgctacctttgtgttcttactgctctatctgtttctcaacagctatgaaaatgccaccattaagaccttcttctcaggctggtccgtcttctgggtcaagatggcctcctgctggatgtgtgtgctgctgtacctgcagaccttggtggcccctctctgctgtccctccaggcagttctctgtgtgaggatgtccaggtgccctgtggctcagcaggcctgtgcccactgtggagggctgccctttgaacgtgtgcaccaggggtttaagcagcaactggtgccctgtgaaaagctgacatcccctggctagcttaagtaggtctgacaaagctttcaggaaacaaacaaaatctcctgattagcttctagttgtaaaatccaaaaggaaactaccagttagatcgacaggaattgaaatctttagccaagctggtaggtgcaattatctctttatgccttacccaagaattagctgaagttttgttgctgttcttcctggacgtgttttaaccaggccagagcttggggcacagcgtctgtcacagggatgaaaatgtccttgtatggcctgtcactctcatccttggcataaagaagcaacaacaaaaacacttgagtcctcagcctaaggtggggcttggcccctgtcactcacctttgcctgcctcccagagccctcacagttccctgtttatgcagagtacagagggagcccctcctttgactccaccctcaactacttctgcacatccctgccccagcattttctgttgaggtcatgatgctgggagtcatggccttcttgtcctctctgcccttggcagaggtccttcattcttgtctaaggtagtgtttgtaataatgtgaaaagcacaatttcttctcaccttcatgggatgctccaccatgttttccctacccagtacaagacactgcagtaatcctgctcttatttatggcagtgttcatgtgactgtaaaacaagatgcatgttgttgtctttgcccaagtagtggagggttgcagttcttacttgtgagtgtcattaacagtaatgctttaagggtcttaacaaaaacgttgcttctttactgcagcttgccacacccctctcagtgttaaggtcagcccccctgactcacccccaccatgaggccttcctcacttacagtgtgcccccaatgctaacagcatggtttccttgaagtagaggagggctggggtaaggttcccaagcagcttccaacagagctggccacacagatcggccagacaagctgtgcaagtgtggaattaggctgagatgcaaaagtcggtggttggaggcatctcacaagactacgattacatccatacaaattcctagatatgcttttggaaagcagtgctcacaagtgtgcattttagtgccaatgttcatagtgagggagaggatttccccagtgcctatctgaacaaatcagacagaattgggacccacataagcctgattcccacaagccaaaatgtcagaatcttcatttctactcactactgtaccctcctgctaaaaggacccacggaaagaaatagtggtgaattcagtggagagcttgtctggtttatagtatttgagatcctgtcttaaaaggtacacacataaggacaccttgtctgtaaactctcagcagttcaaagagaggagaatcacacaaagcatagctgtatactagctctaaacaagtctagttaatccagtaggaatgggagcctcatcatctggggcctgtgtaaggcagcagcttcgttgcagcagcccctgctgtgctgaagaaaggaggtgctgagagagaggcagagaggaactctgctggggggagcaggattgttttgccaaggtttgtctctgctgagactggaagccaggcgtggtgacttttgaactggtcacagccaggctgacgaggccacacatacctgggctagcctttgttggccccttttcctctatggaaagcagctcagggaaacccagacagtaccagtggctgccccggtggcttccctctgaaccaagccccattcactttctagctgcctaagtcttggttgagtacatgccctgccgttcttcagaagttaggcctcacacaggacgaagagctggccaccctcttctttactctcagctaatggtataaatggatggtcagaattgagatgaagggtttctaagagagatatacataagaattgatcctttaatctctgctgaagtgagggagtctctggtttctagggcagctagaccctatttcaaaacaaaaagttggcatttgtgatcagctgtgagaaactactcaggtagaagcctgtttgtgagcttaggaatactattgtttgtgaaactggagaaaactggaaagtgtgccattgttttgagataacaacagcaatgttaccttgcttttaaagataacaggcctttgcttcgtgcaatacccaagcaacactatcaaaattcatgctttgaagctgcccatctgaccttagccatggcagccctggaggcagagtttagaaatcatgtgttctctccctctagtgttttatgagtaaaatgttagttatgccatggagggattctcctgggagtctcattcacacatgatgcctgcttcaagtttttgtggtgctggatagctgatctgggtttcttgggaagtcagcagatgaattgttctgcaggggtttggggaagttttatggagtgggtggactgtggtatggaaagagttgtggggggagacatggagtattgagacttctggttccgaatcccatagggagtggccagtgggagacatagtgccatgtctccagttccacggtgacttcacgccagtgttaattgcccccttcccaaattgtcaccctctgtctttatccaataatgttctcatgccgtccttggtgcttcacgttaccctggaaagagagctccagagcttgcatttaaacttctgggcatctctgcttcaatgcctttctaaccagtggctctttttcgtgtgcggaaacataaaccagtgcacatcccacatactgccaagaagtgaaagggcttcataaggaagatgggcaccagggaggaccctgggcttcctcctcggacatgagcttgccacctggtcatatgctctgaaggtttcttctgtgactgagactagtaaacattttattccctgcagagatgagctgtctggcatgggggtgacttcagtagacaggagagccgacatgatggctttagctcgttctcacttgccgttttccatcactgaggcattcacagagacagttactttaaaaggctgaaacacttggcttttaccaaagaggtgtatctgattttgttttagttgggcaagggcagaactggaatgcatttgcccaattgacttcaagaagtttaactacattcatgtgaggaaaatgatagaagtctttaaggtaattctttaggatcctgggaaattctctcaggtaaagaaagattacagcagatgagtaatatatgtcttgagagctatttataaaaattgtaagaggatcattttgtttccatttattaaaaagttaaacttttttactttgcaaagaaaatactacaaacatttttatagtcataactgttaatttttttaaaaagacttttttttttggaaacaattagctgtagccaaattttgtggttacatttttgctatagtggagtttgaatgcaatctgtgtggtaagtctactgtttgtttataaaggtctctgacatggttagattttgctaccttttaaaatagttatttttccccattagccacaaagccaattatggatttgtatttgtgtttttcaatgctaatttttctatgaagcacctgaaattgactagccttttcctatgtagaaaactcaaacatgttaactctgtactttaataaaatgtaaacttgaaatcatgttgtttgttttctattagacacctgactaaagtctccagttagcctttgccagagctagtgccttcttatgtcaaccagagttcaaacattttggcagctatactgatgatggcttgtgattgacaaataaaaatgggtgatttgtggtatctaatttaaggccttgaagtacaaatagaatggctaaatcaagctagttaacatgtataacttttttatggtgagagcacgtagtccacctgtgtaacaatttaaaatgctgttagatacaatcatgtttcagagcacttcccttgaacatagttcttcgaagcttagctgaaattctgattcttcaacatgactcaaaagtccttggtaaccagttttacaatccacttctgtgttgacctcatttgttgtttgtgttttaggagctacaagttgaatacagagcttcatgtatggtaggcaggaacaatatcactgaactacagcctagacaccaagtctaaccttggctttcttaagacaaatttcactgtagctgaatgttactaaaattcatccttaggggaccataaaagggaccccttctccataggtcccagcctcaagcagatatgattctgccaaagttcattcaagggagacaattagtttatacttctttatgaagatcattggtgagtggttacttatagaggtgtgggtgttccttccctcaacaggggaaagcctttgtccagcaagggtgagggcttccccgtagccaaatagatggtgtccccttcctgtagtgttccttcatctttatactctcgagcctcccccaaagacacatgcaattaaggcagagtactgcatactcagataagggtcctgtggccctctctgttcctccataatggggagtaatcaaaccatcagcaagccctgtcgtgatgatcttttagcaaggggagccactgaactgcccaggatggtggttgctccacttggaggacagtcaactcttaggtggcctgatttgtcgtctacacttgcactgtattgcttaccaatgttctacatggtcattcaagtcacttcatattacaggagttccttcattttaaaggctcaatattccattgtgtgtgcctcacattttctttgtgtattcttttcttatcaagaagagtcacaagaccatctggtaaaacagaaataggagactttagcagctatcttggaaaatgcaattcagcacaagctcttgtggcttactgtctcattcaaaggaagagctgaagtctgtgcaggggtctattaaacaaccctctcccctgctgtcgttgcttcagccaccttgcacacccctgtaaccctctccatggccagtctgtttcagcatccttggtttccctgctgcttaagggcatcagatgtatactcctcttccaagaagactccttgggttgcatgcagtgttcttcccaccctgtgaccccctccccgacctccctgctttatcattttacatagagaccattgccttctgtcttagttgtttttttttttttttttatagctgtagcaaaacactgtgacagagacaccttataaaagaaagtgcttaattgcacttatggttccagagggttatggtctatgatggcggaacaaaggcacagaggcagtgacagctgagtgctcggatctggatcaacagtcaggagccagagcacatggagagtggagctagttctttgaaacctctaagcctgcctacagtgacacacttccttcaccaaggctacacacctcctgatctttcttaaacagttctaccacctggggaccaattattcaaacatgagtctttggaggccattcccacataagctaccacagcatccagcttactgttcgtatttgttcacatggtccctgggacactaaggtccttcaagcttcactcaggtatctctgatgcctcgaatggtactgctcatgttctggtgttcagtgaatggatgaaggagtgaaagaaggatttgtgagtagtgatggtggaagatgaggctgttgaggctttgacatccatggagggcttcacacgctaattaaaatggctgaactgtttagtgaggtatggactgtggtgatcagtaagggatggacaatatccttaggcatgtatgacccataggtcctggatagctcatacacgttagtattgcaacatagatcctgtttaggactaggattatggctcagtggaacagcttgtacttagcatacttaaggccctgagtttgatccctagggtatatagataaacacataagtatgcccttgaaagttaatttgaaaaatacagtaagggctggagagactgcctagtggttaagagcactggctactcttgcagaggacccaagttcaattcccagcacccacgtgctggttcacaactatacataactccagttccatgggatccaaaaactttttctgagccttgcaggtacaaagcacacatgtggtacacatacatacaggcaaaacactcaaatgcataaaataaatgtcaaaaaaatgtggaagctctctatggtaggatacacatttaatcccagcacataggcaaaggtaggcaaatttctgagtttgagggcaacctggtctacatagtgagactttgtctcaataaacaaaaccatagaaaacattgacaaaacagtcaaagaaaatgcaaaatgcaaaaagctcctaaccccaaaacatccaggaaatccaggacaaaatgagaacaaacttaaggataataggtatagaagagagtgaagattcccaacttaaagggcgaataaatatattcaacaaaattatagaagaaaactttcctaacctaaagaaagagatgcccgtgagcatacaagaaggctacagagatccaaatagactgtaccaaaagagaaattcttcctctcacataataatcaaaacaccaaatgaattaaacaaagaaataatattaaaagcagtaaggggaaaaggccaagtaacctataaaggcagacctatcagaattacaccagacttctcaccagagactatgaaagctagaagatcctgggcagatgtcatacagaccctaagagaacacaaatgccatcccagattactatacccagcaaaactctcaattaccatagacagagaaaccatgatattccatgacaaaatcgaatttacacaatatctttccaaaaatccagccctacaaaggataatagatggaaaacaccaacacaaggaaggaaactactccctagaaaaagcaagaaaggaatctctcaacctaaaaagatagccacacaaacataattccacctctaacaacaaaaataacaggaagtaacaatcacatttccttactaactcttaacatcggtggactcaattccccaataaaaagacatagactaaaagactggatacataaacaggacccaacattttgctgcatacaggaagctcacctcagtgacaaagacagacaatacctcagagtaaaaggctggaaaacaaatttccaagcaaacagtcccaagaaacagcctggagtagccatttgtcttagtcagggtttctattcctgcacaaacatcatgaccaagaaacaagaaggggggagggggagggtttattcagcttatacttccacactgctgttgatcaccaaaggaagtcaggactggaactcaagcaggtcaggaagcaggagctgatgcagaggccatcgagggatgttactgacttgctcagcttgctttcttatagaatccaagactaccaggccagagatggtcccacccacaaatggcccaacctccttgatcactaattgagaaaatgccttacaactggatctcatggaggcatttcctcaactgaaactcctttctctgtgataaccccagcctgtgtcaagttgacacacaaaaccagccaggacaccattctaatatcaaataaaattgactttgaaccaaaagttatcaaaaagtataaggaaggacacctcatactcatcaatggaaaaatctagcaagaactctcaattctgaacatctatgctcccattgcaaggccacccacattcataaaagaaactttacaaaactaaaagcacacattgcatctcacacaataatagtgagagatttcaacaccccactctcatcaatgaacagatcatggaaatacaaacaaaacagagacacagtgaaactaacagaagttatgaaccaaatggatctaacagatatttatagaacatttcatcctaaagcaaaagaatgtaccttctcagcacctcatggtaccttctccaaaactgaccatataattggtcacaaaacaggcctcaacagatgcaagaggattgaaataatcccatgcactctattagataaccatggactaaggctggtcttaaattccaacaaaaacaatgaaagacacacatacacatggaagctgaacaaggctctactcaatggtaacttgctcatggaagaaataaagaaagaaattaaagactttttagaatttaatgaaacggaagccagaacatatcaaaacctacgggacacaatgaaagcattaataagaggaaaactcatagctctaagtgcctccaaaaagcaactggagagagcttacactagcagcttgacagcacacctgaaagctctagaacaaaaagaagcaaatacacccaagaggagtagacggcaggaaataatcaaactcagggctgaaatcaaccaaataaaaacaaaaagaactatacaaagaatcaatcaaaccaggatctggttctttgggaaaatcaacaagatagataaacccttagccagactaaccagagggcacagagacagtatccaaattagtaaaaccggaaatgaaaagggagatataacaacggaaaccatggaaatttaaaaaaaaatcagattctactacaaaagtttatattcaactaaattggaaaatctggatgaaatggacaattttccagacacatgacaggtgccaaagttaaaataggatcagataaaccatctaaacagtcccataacccctaaagaagtagaagcagtcactaatagtctcccaaccaaaaaaaaaaaaaaagcccaggaccagatgggtttagtggagaaatctatcagatcttttaagaagacctgataccaatactcttaaaactatttcacaaaatagaaactgaaggaacactatccagtttgttctatgaagccacacatatgattatacctaaaccacacaaagacccagcaaagaaagagaacttcataccaatctcccttatgaacattgataaaaaaatactcaataaaattcttgccaacagaatccaagaacacatcaaaacgatcattcaccacgatcaagtaggttatatcctggggatgcaaggatggttcaatataaggaaatccatcaacgcaatccactacataaacaaactcaaagaaaataaccccatcatttcattagatgctgaaaaagcatttgacaaaattcagtatcccttcatgttaaaggtcttggaaagattaggaattcaaggcccatatctaaacatagtaaaagcaatatacagcaaaccagtaaccaacatcaaattgaatggagagaaacttgaagcaaccccactaaaatcagggactaggcaaggctgcccactctctccctatctattcaatatagtactcaaagttctagctagagcaattagaccacaaaaggaggtcaaagggatacaaatttgaaacgaagacgtcagaatatcactatttgtagatgatatgaacgtatacttaagtgacccccaaaattcatctagtatatatataataaaatagtgatgttgaaaacatgctgaatgtgttctggatttgtcacgtgaaaaataatttagaaaatactgtgtgctataatagaaactgcacatgtgcatttgatttgtgtacatgcatgtacatgcacacatatacatgcaagaaatagttcaagtagctagatgtggtagcatacttagaatcccagaagtcatcatgctgagtcagcagagtggagagttcaaggccaacttgaatcacatgaagaggctctctcgaaacaaaatatttcaagtgttcacctgtaatctttgtggcgctgtcctgccctgtctcccagccttcatattatagacactgtttataaggctcaaataggaacagcctttccacatagccctgtgtcagctgcagctcactgaaccaggactttccctccaagctgagcaatgggcctctctatgcaaagttgtaactgtggatgttaaggttgctgctgcctttgccagcaattagagggacagggacacaacttcacatggccactctagcagcctgagaacttcctgagggacctcaactcagggaaacacaggacacttggctttgatttcaagattagccagtatgaagtagggttggtgttaagaatagaaatgtttcattctttccatgagcacatttctggtgagagtcttagaaaaattttaggcttataacttcaaaggggaaaaggcccttaagtgaatattgttaattatagtgaaattctcaaaaatttttagatggtgataatgaaaatggaagacatgttgtctagttttatgtcaacttgacacaaactagaatcaatagagaaaatgttttcataagattagcctgtcggcaaatctgtagggcattttcttagtaagtggttgacacgggagggcccagctcactggggcagtgttagccctgggttccgagttgtataagaaagcaagctgagcaaaccatgagaaacaagccagtaagcagcaccagttccttccttcaggtttctgtcctgcttgagttcctgccctgacttccttcagtgaaggacctttctttcccaagctgcttttggtcatggtgttttatcgcagcaatagaaaccctaaataagacaggagctaaaacttgtctgggtggtttaggatgagaagaccccaagagaatgaatcacctttttttcttagctaaaggtcaggaaagtccttgggacctttgtaagccttatctctgccagaggtcagagatgccaaacgtgtagggggctaggatccatgatctggtgcgtaaacgagattttgattatctcttcagaggggagaaagttagcatggcaatagggaaatattaagggaaagtgcctggtcaggaggatagaaccctgttctgggtggagacctaacattctgcataacagcatcaatgacctggttaaagaaccatgtctagggttttgtggacactgctgtccctgttgcctcttgctacagccatggtcatccccactgggtacttagacatctcagccaacggcaagcgctcggaccacatctcctttgagctgtttgtggacaaagtcccaaagatagcagaaaactttcgtgctctgagtacttgaagagaaagggtctgtctattagggttcctcctttcatagaatgattccaggattcgtgtgccagggtggtgacctcacacactgcaatggccctggcagcaggctcatctacagagagaaacttgaggatgagaacttcatcctgaagatacgggtctgggcagcttgtccacagtaaatgctggaccaagaagtgcttgactgcactgctaagactgagtgccaggatggcaggcgtgtggtctctgggctggtaaaagaatgcatgagcatcgtagaagctatggagcatttagggtccaggaatggcaaaaccaacaagaagatcactgtggacaactgattcttttgcattatgggcatcttatccactaggccaccccttctgtagttcaggagagtgcccccaccccatctgttcacaataatctgtaatttctgctctccctgaagttctttgcggctcatgtctttctcatgccccttcaagtctagctgaattgcagggttaagcttatgatcatgaataaaaactaaataaggggaaaaacatctctaaaaaggtgggttcaccttaagctgtactaaagagacgggcagaataattatccctttaatgagattctgtactttcccttccagaatcatgtgtccagtgacctgggcctaagagaccaggtcctccatccttctgagtcccgactcagaaaggcacagcttgtccttttccttttctctctggatcatttgtgtcacctagaactgaagtgtgctgtttccatactttaggcccccttactctctctaaagctcccacccccaccatggaactttcatgccaccataactcagacagcatggctttccccttatcctctcctctccttttcccggtaactggcgagatttatggcttccctcccctggggtttttccttgtaagtgctaagaaaattgtccacaaacttctgcttgaatcctttcttcaattcttttgttaaggagacaaagaacctaaaggtaggaaggtggttaatttccctggtatctgaagaggctttaactacatcctgctaacttcccctgctttctatccctcctggcattgagctactaagttaaaaaagctaaagtcctatgtgattgaggcatcatagtctccaaaggaaaggtcacttgcaaaaggtggaagactcaaacaggtgtgcagaggagcaactgtaggagagagggaaggagtgggcgaatgttctggagttcctcctggtgtccttcctttggttctgaaccacattggggggggggcagcttgataaagtgatgccaaaggctaacatctgtggagcatttctatgactgctgccattctcccaacgactccatggctgttggtgttctaacccctttaatcaggggaaaggcagagtttctgaaatccttactaagtacatttggtttcatagacactgccaaatggctccctctcccagccctgtcttccacctctgctttgctctccattctaccccttagggtaccccaagacctccccatgccttccttcttctcatatttaggttttcccttggcctttctattgtgtaatgctgtgtcaggaaagtgttgtattgctgggctttaaacctctgggaacttggtttagttgctcttgaatgtccaaccgtagattactgtaacccctcagcgggcccccaggcactgctttgcagatgtgtttcatttgtcttccagccacaggcccatcatggtcagggttggatacttagcgcatgttttaggaaaggaaatatcaagacgagtctggaatatcatattattgccaggaccccaaaattcttccaacaacttttggatgacaagctaagttatgtctagttaggaattttatctggagctgaattttgctgtatgctgtagtattttgtgtatatcttcttgctttttaaggtgaacagagactgatttttaggtttaaaacattagtcaaaactccataagctataggtagttaagtttgtggtctatccaaatgtttaatttataattgtatcttagctgcttaggaggatttttgtctataaatcagaaataaaatgttgctttgatggtgtgtgtgtgcacgtacctgtgcatgtgtgcatctaaacacaagagcgtgcctaagtgttcatgtgtacatgcatgtggagtgtggaggtcagaggtcagcctcagacgtcgttcttctgatgctgtctgccttgcttttgagacaggatctctcattaacctgggacttgcccagtaggttagactgtctggccagcaagcctcaggatttgcctgtcgctgactctccactcctgacattttctgtaggctctagggactgaactcaggtcctcaagcctgaatggcagctgctttacctctgagctcttt

SEQ ID NO: 68 - DNA, 5174 bp, Mus musculus
ttggcctgctgttgcggatctgctggctgctccctctgctgtggctgctgccctaagttccgacagtctcggaccacccgcttcatgtatttattctacttcatcctggtcatcgccctctgctgtgtgatgatgacaccctctgtgatgaagcaggtgaaggaccacattcccttttttgaagagttctgtaaaaagactcaagccggtggtgacgcctgtgagaacctggtagggtattctgcggtgtacagagtctgctttggaatggcttgtttctttgctctgttttgcctgctgaccttaaaagtcaacaacagcaaaagttgccgggcctacattcacaacggcttttggttctttaaattgctgctgttaggggccatgtgctcaggagcgttcttcattccggatcaggagacctttctgaaagtctggcgctatgtgggagctgggggcagcttcctcttcatttgtatccagctcctcctgattgtgcagtttgcacataagtggaacaagaactggactgcaggcaccgtccgtaataagctgtggtacgcctccctgtccctggtgacactcatcatgtattccgttgctgttggaggcttggctttgatggcagtgttttacacacagtgggacgactgcatggacaacaagattctcctgggagtgcacggtggcctatgcgtgctaatctctctggtagccatctcgccctgcgtccagaatcgacagccacactctgggctgctgcagtcagggctcataagctgttatgtcacctacctcaccttctcagcactgaccagcaagcctgaaaaaaaagtcctggatgaacatgggaagaatgttaccatatgtgcgcctgactttggtcaagacctgcatagagatgaaaacatggtgacttggctgggcacccttcttctaattgtgtgcatctcatattcatgtttgacatcgacaacaaggtcgagctcggatgctctgcagagtcgatacggagcgccagagctggaagtagcccggtgctgtttctgctttggtccagatggagaagacactgaagagcagcagaacgtcaagaagggacccagggtgatttatgatgagaagaaaggcaccgtgtacagctactcctatttccacttcgtcttcttcctggcttccctctacgtgatgatgactctgaccagctggttccactatgaaaatgccaccattaagaccttcttctcaggctggtccgtcttctgggtcaagatggcctcctgctggatgtgtgtgctgctgtacctgcagaccttggtggcccctctctgctgtccctccaggcagttctctgtgtgaggatgtccaggtgccctgtggctcagcaggcctgtgcccactgtggagggctgccctttgaacgtgtgcaccaggggtttaagcagcaactggtgccctgtgaaaagctgacatcccctggctagcttaagtaggtctgacaaagctttcaggaaacaaacaaaatctcctgattagcttctagttgtaaaatccaaaaggaaactaccagttagatcgacaggaattgaaatctttagccaagctggtaggtgcaattatctctttatgccttacccaagaattagctgaagttttgttgctgttcttcctggacgtgttttaaccaggccagagcttggggcacagcgtctgtcacagggatgaaaatgtccttgtatggcctgtcactctcatccttggcataaagaagcaacaacaaaaacacttgagtcctcagcctaaggtggggcttggcccctgtcactcacctttgcctgcctcccagagccctcacagttccctgtttatgcagagtacagagggagcccctcctttgactccaccctcaactacttctgcacatccctgccccagcattttctgttgaggtcatgatgctgggagtcatggccttcttgtcctctctgcccttggcagaggtccttcattcttgtctaaggtagtgtttgtaataatgtgaaaagcacaatttcttctcaccttcatgggatgctccaccatgttttccctacccagtacaagacactgcagtaatcctgctcttatttatggcagtgttcatgtgactgtaaaacaagatgcatgttgttgtctttgcccaagtagtggagggttgcagttcttacttgtgagtgtcattaacagtaatgctttaagggtcttaacaaaaacgttgcttctttactgcagcttgccacacccctctcagtgttaaggtcagcccccctgactcacccccaccatgaggccttcctcacttacagtgtgcccccaatgctaacagcatggtttccttgaagtagaggagggctggggtaaggttcccaagcagcttccaacagagctggccacacagatcggccagacaagctgtgcaagtgtggaattaggctgagatgcaaaagtcggtggttggaggcatctcacaagactacgattacatccatacaaattcctagatatgcttttggaaagcagtgctcacaagtgtgcattttagtgccaatgttcatagtgagggagaggatttccccagtgcctatctgaacaaatcagacagaattgggacccacataagcctgattcccacaagccaaaatgtcagaatcttcatttctactcactactgtaccctcctgctaaaaggacccacggaaagaaatagtggtgaattcagtggagagcttgtctggtttatagtatttgagatcctgtcttaaaaggtacacacataaggacaccttgtctgtaaactctcagcagttcaaagagaggagaatcacacaaagcatagctgtatactagctctaaacaagtctagttaatccagtaggaatgggagcctcatcatctggggcctgtgtaaggcagcagcttcgttgcagcagcccctgctgtgctgaagaaaggaggtgctgagagagaggcagagaggaactctgctggggggagcaggattgttttgccaaggtttgtctctgctgagactggaagccaggcgtggtgacttttgaactggtcacagccaggctgacgaggccacacatacctgggctagcctttgttggccccttttcctctatggaaagcagctcagggaaacccagacagtaccagtggctgccccggtggcttccctctgaaccaagccccattcactttctagctgcctaagtcttggttgagtacatgccctgccgttcttcagaagttaggcctcacacaggacgaagagctggccaccctcttctttactctcagctaatggtataaatggatggtcagaattgagatgaagggtttctaagagagatatacataagaattgatcctttaatctctgctgaagtgagggagtctctggtttctagggcagctagaccctatttcaaaacaaaaagttggcatttgtgatcagctgtgagaaactactcaggtagaagcctgtttgtgagcttaggaatactattgtttgtgaaactggagaaaactggaaagtgtgccattgttttgagataacaacagcaatgttaccttgcttttaaagataacaggcctttgcttcgtgcaatacccaagcaacactatcaaaattcatgctttgaagctgcccatctgaccttagccatggcagccctggaggcagagtttagaaatcatgtgttctctccctctagtgttttatgagtaaaatgttagttatgccatggagggattctcctgggagtctcattcacacatgatgcctgcttcaagtttttgtggtgctggatagctgatctgggtttcttgggaagtcagcagatgaattgttctgcaggggtttggggaagttttatggagtgggtggactgtggtatggaaagagttgtggggggagacatggagtattgagacttctggttccgaatcccatagggagtggccagtgggagacatagtgccatgtctccagttccacggtgacttcacgccagtgttaattgcccccttcccaaattgtcaccctctgtctttatccaataatgttctcatgccgtccttggtgcttcacgttaccctggaaagagagctccagagcttgcatttaaacttctgggcatctctgcttcaatgcctttctaaccagtggctctttttcgtgtgcggaaacataaaccagtgcacatcccacatactgccaagaagtgaaagggcttcataaggaagatgggcaccagggaggaccctgggcttcctcctcggacatgagcttgccacctggtcatatgctctgaaggtttcttctgtgactgagactagtaaacattttattccctgcagagatgagctgtctggcatgggggtgacttcagtagacaggagagccgacatgatggctttagctcgttctcacttgccgttttccatcactgaggcattcacagagacagttactttaaaaggctgaaacacttggcttttaccaaagaggtgtatctgattttgttttagttgggcaagggcagaactggaatgcatttgcccaattgacttcaagaagtttaactacattcatgtgaggaaaatgatagaagtctttaaggtaattctttaggatcctgggaaattctctcaggtaaagaaagattacagcagatgagtaatatatgtcttgagagctatttataaaaattgtaagaggatcattttgtttccatttattaaaaagttaaacttttttactttgcaaagaaaatactacaaacatttttatagtcataactgttaatttttttaaaaagacttttttttttggaaacaattagctgtagccaaattttgtggttacatttttgctatagtggagtttgaatgcaatctgtgtggtaagtctactgtttgtttataaaggtctctgacatggttagattttgctaccttttaaaatagttatttttccccattagccacaaagccaattatggatttgtatttgtgtttttcaatgctaatttttctatgaagcacctgaaattgactagccttttcctatgtagaaaactcaaacatgttaactctgtactttaataaaatgtaaacttgaaatcatg

SEQ ID NO: 69 - protein, 452 aa, Mus musculus
LACCCGSAGCSLCCGCCPKFRQSRTTRFMYLFYFILVIALCCVMMTPSVMKQVKDHIPFFEEFCKKTQAGGDACENLVGYSAVYRVCFGMACFFALFCLLTLKVNNSKSCRAYIHNGFWFFKLLLLGAMCSGAFFIPDQETFLKVWRYVGAGGSFLFICIQLLLIVQFAHKWNKNWTAGTVRNKLWYASLSLVTLIMYSVAVGGLALMAVFYTQWDDCMDNKILLGVHGGLCVLISLVAISPCVQNRQPHSGLLQSGLISCYVTYLTFSALTSKPEKKVLDEHGKNVTICAPDFGQDLHRDENMVTWLGTLLLIVCISYSCLTSTTRSSSDALQSRYGAPELEVARCCFCFGPDGEDTEEQQNVKKGPRVIYDEKKGTVYSYSYFHFVFFLASLYVMMTLTSWFHYENATIKTFFSGWSVFWVKMASCWMCVLLYLQTLVAPLCCPSRQFSV

SEQ ID NO: 70 - DNA, 133300 bp, Homo sapiens
  misc_feature (1)...(133300): n = A,T,C or G
gccacagcagcagaagaaggtggcaaaggggagtcccaggatgaaagtgcagcagcaacctggaggaatccagactgcagtagtgcagaggtctctgggaccaagacagggcccttggggaaagtggaatgacagactgtctgacatggatgatcatctgggaaaaaaggattttgacaggcctggcactgtggctcacacctgtaatcccaggactttgggagggccaggtgagaggatcacttgaggctaggagttcaagaccagcctggtcaaaaattacaaaatttagccatctgtagtcctagaggctcagcaggctgaggcaggaagatcgctcgagcccaggagtttgaggctgcagtgagccaaaattgtgccattgcacttcagcctaggtaggtgacagagagaaaccccatctcaaaagaagaaaaaaaaaaaagattatgacaggccagtcatggtggctcacgcctgtaatcccagcactttgggaggctgaggcggggggaagccagcactcgctgaggccagaagtttgagaccagcatggtaaaaccccgtctctactaaaaagacaaaaattagctgggcatagtggtgggtgcctgtagtcccagctactcaggaggctgcggcagagcttgcagtgagctaagatcgcaccactgcactccagcctgggagacagagtgagagtccatctccaaaaaaaaaaaaaaaagattgtgacagatcagatggacaagtggagaagaagcaagaacaagtacatagaaaaccattcaagtaatatataacccaagaacttaacgcatgctatgtgttattgtacttcactgtgtataaatgtatgaactctccttattttacagaggatgaaactgaggtacagagaaattaagtcacttcctcaagattacagacctaacaaatggtaaagaacaaatttcattccagggtccagctccaggggttctaaccctaaccattagaatatactgcctctaacaggagggatgaaattggaaaataaaagtagacaaaaaacgctaatattatatactatgtggctatgtaatgcataattttgactagacatgattacatgttggccgataaattttatgaaaaccgtgatgtaattagattggcaagggggcaggtgaaagtgggttgagaattcagcctaaatggaacataaaagaaactgcaaaataaatgctgcccacacatcaggaaataacagcagaagaacattatttgaaaatatgaggctgggcacagtggctcatgcctgtaatcccagcactttggaaggctgaggcgggcagatcacctgaggtctggagttcgagaccagcctggccaacatggtgaaaccccatctctactgaaaaaaagaaaaaagggaaggggaaggggaaggggaaggggaaggggatattggctaggcacggtggctcatgcctgtaatcccagcagtttgaaaccctgaggcgggtgaatcacttgaggtcaggagttttgagaccagcctggccaacatgatgaaatcctgtctctactaaaactacaaaaatattagatgggcctgggtgcagtggctcacgcctataaccccagcactttgggaggctgaggtgaatggatcatgaggtcaggagttcaagaccagcctggccaagatgatgaaaccctgtctctactaaaaatacaaaaaaattagccaggcatggtggcgggtgcctgtaatcccagctactcaggaggctgaggcagagaattgcttgaactcgggaggtggaggttgcggtgagctgagatcgcaccactgcactctagcctgggcgacagagcaagactacatctcaaaaacaaaaaacaaaaaactaaaaggccaggcgcagtggctcacacctgtaatcccagcactttgggaggccaaggtgggcagatcacgaggtcagaagatcgagaccatcctggccaacatggtgaaaccccatctctactaaaaatacaaaaaattagctgagcgtggtggcgtgtacctgtaatcccagcgattcgggaggctgagatgggagaatcacttgaaccagggagtcagaggttgcagtgagccaagacagtgccactgcactccagcctggaaagtgagcaagactccgtctaaaaaaaaaaaaaaaaattagctgggcatggtggcacatgcctgtaatcccagctactcaggagtctgaggcaggagaatcacctgaacctgggaggcggaggttgcagtaagccgagattgtgccattgtactccagcctgagtgacagagtgagactcaatctcaaaaaatatatatatgtatatatttatatatatgtatatatttatatatatatatatacacacatatatatatatggaggtgaataggggaaaactgtataaatgactgaaagtggttgcctctggggtaggaactagaaggtaaggaatggagactggagaggatatttttcattttattttttgtaatatttggacccattttatgtcattgtcaatttgtaaacttttgacactaaaaatttttactctaaaaattaaaaaaattgccaggcgtggtggctgacacctgtaatcccagcactttgggaggctgaggtgggtggatcatctgaggtcaggagttcgagaccaacctgaccaacatggtgaaaccgcgtctctaccaaaaatacaaaaattagccaggtgtggtggtgggcgcctgtaattccagctactcgggaggctaagacatgagaatagcttgaacccaggagttggaggttgcagtgagccgagattgcgccattgtattccagcctgggcaacagagcgagactccgtcacacacacaaaaaaagggccaggcacggtgatggtgatccacacctgtaattctagtagtttgggaggccgaggcaggtggatcacgaggtcaggagttcgagaccagcctgaccaacatggtgaaaccccatctctacttaaaaaaaaaaaaaattaaaaaacattttgcatatgctgggtgcagtggctcacgcctgtaatctccgcattttgggaggccaaggcaggtggattgcttggcctcaggagttcaagaccagcatgggcaacatggtgaaacccagtctttacaaaaaatacaaaaattagccaggctgtgatggtgcatacctgtagtcccagctactcaggaggctgaggtgggaggatcacttgagcctgggaggtgaaggttatagtgagccgtaatggcatcattgcactccagccttccagcctgggcaacagagagagagaccctgtcgccaaaaaacaaaacaaaacaaaacaaaacaaacaaaaacctgtgcatatattaatttaatagaaataaatgacaatatagctatcagagaaatggggtgaaggcactatagggctctgattactttttgcctggggcttgcaaatttatagctatttgtttctaaatgaatactttgttgtttacttttaattgaaattaattaaacttcgtccactggattgaggttcctagagacctcataagtgaaaattaaagaaatttctccttttatagttaaaaaccaacagaatgcttcactaggttttttttcaaagttgttcatgttttaaataattagaataattggaaattaaatttgtaataaagttgcgatcttggctcactacaacctccgcctcccaggttcaagcgattctcctgcctcaacctcctgagtagctgggattataggtgcctgccaccacatccggctaatttttgtatttttagtagagatggggtttcaccatgttggccaggctggtctccaactcctgacttcagatgatccacgcacctgagctttcccaaaatgttgggattacaggcgtgagccaccacgcccagccagtgtgtggtgtttttaaactcaacattgaactctaccaaaaaaatcttcaaattcaggaggagaaaaaagcaaattataagctagatatttatgttatatatacttatatataattatgttgtataaaaggagctaattcagttaatttaagaaaatttttgtgggggaaatatttcacatggtctgccaagagctatacagtcttattaaaacaggtctgttactgctggttactgaaaaagtcacatcaaaagagcttgactgtaaaattatctacgtgttatgaacatcaagtctcccctgaaaaagtctgcagagtacttaaaataaaaattaaggtgccactgtttcgtgttatgtctgctaacattacctctactcttgtttttttttttttttttttttttttgagacggagtctcgctaggtcgcccaggccggagtgcagtggcgcgatctcggctcactgcaagctccgcctcccgggttcacgccattctcctgcctcagcctcccgagtagctgggactacaggcacccgccaccaggcccggctaattttttatatttttagtagagatggggtttcaccatgttagccaggatggtctcgatctcctgacctcgtgatccgcccgcctcggcctcccaaagtgctgggattacaggcgtgagccactctgcccagcctactcttgttaaccaaccacgatgcaaaggaagctattaaccagaccttaaatagtaactgcaaagtcctcagagccagaaggcaggtaaacctccagatctggccacattcctttgaaaaaactctgagtggggaaagggaatgagcctgtatagactgtttctttttaattttctttttcttttcaagatggagcctcattctgtcgcctaggctggagtgtagtggtgttttctcggcttactgcaacctccacctcctgggttcaagtgattcttgtgcctcagcctcctgaggagctgggattaaagatgtgccgcgacgctcggctaatttttgtatttttagtagagaagaggtttcaccatattggccaggctggtctcgaactcccaacctcaggtgatttacccacctcggcctcctaaaatgctgggattataggcatgagccactgtgcccggcctcttttttttaatggacagatcctgcctcatgtttgtttgtataaatagaaaagaatggtaccagctccatgcagaaacagatggcagcccagggctcacaccagtccttctgtcctcccattggtagacagaggcctctcctccagatcctttgtgggtgtgcatgggcacccttggaaatttgatctggagctggaactggaactggaactggagctggaactggaactggaactggagctgcaactgaagtctgggctttggttggagccttggccttggactttggccggcaaaaccagccttggccaggtgggttcaagcatgcttcctaagcttggggtggatgattcaggcaagttgattgaattttcagctgatgtcttttggtatcttgagcttgaccatgtaggggtgaagggcaaacttcccctttaccctctgaagtttcactgaaaatcaaccgacaaggcagattaaaaggaaaaaaggcatacaaatttatttgatcatagttttacatgccatgggagccttcagaatgaagacccaaagatacagcaaaattgtccattcttatgcttacattcaacagagtatggacagccatgtagaaatgtgactggacaaaaagtatattgttaccagagtggggtcctcatccagtccacaagagagggttcttgaacctcacgcaagaaagaatttggggcaagtccataaagtgaaatcaaatttattagagaagtaaaggaggtaaagaatggctactccataggcagagctgcagcatgggctgctcaactaattatagttatttcttgattatatgctaaacaaggggtggattattcatgagttttccgcgaaagggatgggcaattcccagaactgagggttcctcctcctttagaccatatagggtaacttcctgatgtttgtaaactgtcctggtgctggtgggagtgtcttttagcatgctaatgaattataattagtgtataatgagcagtgggcacgaccagagctcactttggtcgccatcttgattttgatgggttttggccggctcctttactacatcctattttaccagcaaggtctttgtgacctgtatcttgtgctgacccccaccatctcatcctcgaagaatgccttaacttcctgggaatacagcccagcaggtcacagccttattttacccagtccctattcaagatggagtctctctggttcaaatgcctctgacactattaacctggttttgaagatgaggaaactgaggcttggaggtcacccagctacttcttggtagagttagaatttgcaacttcctggcttgaaaactcaggctttatccttttctggtacctttcaatagaggctacaagtccccaggttatttatttatttatctattgagatagaattttgctcttgttgcccaggctggggtgcaatggcaccatctaggctaactgcaacctccgcctcctgggttcaagtgattctcctgcctcagcctcctgagtagctgaaattacaggtgcccaccaccctgcctggctaatttttgtatttttagtagagacagggtttcgccatgttggccaggctggtcttgaactcctaaccacaggtgatccacccacctttgcctctgaaaatgctgggatgacaggtgtgagccaccgtgcctggccaagtgcccaggttattaagactctttctccaggtggcagacatccacattctcagagtcctctcacattggcatggaactagcaatgtaggggagggaaaaatggcttccctctacccttctaggttctttacttggattgcaaattaaattgacataacagagatttttttttttttttttgagacggtatcttgctctgtcgcccaggctggagtgctgtggcacaatctcggctaactgcaacttccgcctcctgggttcaagcgattctcctgcctcagcttctgagtaactgggattacaggtgcgcaccacctcgcccggctacttcttttgtatttttagtagagatggggttgcaccatgttggtcaggctggtctcaaactcctgacctcgtgatccgcccacctcggcctcccaaagtgctgggattacaggcatgagccaccacgcctggccgacataagacagattaacagaagaaaaaccgttttaattacctgcatacgcagcagcacaggaatctcacaaaacatgaagggccagatgattgaagcttatagcattctgagctagaaataaataagggcttggggcttctgtggggacagtggggaggcaccacaggtaggatataggagggttagtggaggaaatgtatggtaaataatgttgccttgtggctgcgcgcggtggctcacacctgtaatcccagcactttgggaggccgaggtgggcggatcacgaggtcaggagttcgagaccagcctgaccaacatggtgaaaccccgtctctactaaaaatacaaaaattacccgggcgcggtggcgcgcgcctgtaatcccggctacttcagaggctgaggccggagaatcgcttgaacccggggggcggaggttgcagtgagccgggatcatgccaatgcactccagcctgggcgactgagcgagactctgcctcaaaaaaaaaaaaaaaaaaaaaaaaaaaagttgccttgttatgtaaagtctctcatgtaataaaagttctctgagcagctgccttcctgacacagatacttttactatgtggacttcctttatagatgtaaatttgctttacaaaaggacagcttttcagagctactcccgtgtctgcagtttctcagaataaccagcttgaaatgtgccaaacaagtgtattttgggatagcatattttggtattctacagtcataatttggggtgctgtggcctgagcctcagcagcaaaaagaggacatgattcagggttcggagcgctggattctattaccagctctgccccctaacccagtggtctcttgtgaaaggtcctcgagttccgagtcgagtcaatttccctaaaaggcaaagaggcatcggagttccagctggcttaaacatttgtagatttcgcgccttcccttttcgcccctccttcctctccacccgtctccccaccccgagctactagggggcctgcccatttccccaggccaggagtagggctgaagtgaagtgaccgcggtcgtagccaacagcgaagctcattagaaagtcctggtgagagcctcagcttctgatgagtcacagatcgccacggagcaggttgctgcgcttgactgattgggtttaccctatttttgttttgagttagagccaactgtcctcattccttttcgtggctctgagtagggcctgctccattatatctctttctctaaacgcctgcatctgagatgctggaaaatcctgcgcagctcataacccaaggcctggtttccattcacctttcctcttctactcctaagctgcccaagacactcctttgccagagctctgtctggaaacgagtccctctaaggtcaagccttgcgtcatgtgccaggggatcagacgagtggattccaggcccagttttacttcctcaactttgctgtgaggctttgggcaagttatttaacctctctgggcttcagttgcctcaccgctaaaatgggtacggtaatgcttatttgaaagagcaaagggattggcgcaaaaatcgcactaacagaaatatcttcattccggcagggcgcggtggctcacgcctgtaatcccagcactttgggaggccgaggcgggcggatcacctgaggtcaggagttcgagaccagcctggccaagatggtgaaaccccgtctctactaaaaatacaaaaaattagccgggcgtggtggcaggcgcctgtaatcccagctactcgggaggcagaggttgcagtgagccgagatcgcgtcactgcactccagcctgggcgacagagtgaagctccgtctcagagaaaaaaaagaaaaaaaaaaaagaaataccttcattcctcttggggaggtggctgtgaggacagcagatctgagtgggagaaaacctagagacggcctccctgccttctgtatggaacaagcaattattgggcaccctctttttagtgaggaagcagggacggaaaatgagtccttgggccagcgcaggaggagaggctggaaaacatatcaatattcaggaaggcacggaaagggctctcaatggatctctcaccaagtgccatcagggcagaacagtcaagggcccagggattcgaggaagcttgggaggcgcggagagcccaaaagttgaaagttttcttggcagatgagggaaggaaagggatttcaggaacaaggatctcgtgggtgggctgtcccagtcggcgcgcggcagagcgcagaccagcacccggcggtctggtctgtgcaggaaaggcaggaaccgcttactaaggctccaaccttttagaggcagcaacaagctctttctctggatccgaaggcggagaggcgctgcgctctcatttggcgagggcccgagcgcggccagaccgcgcaccagacccggagcgtggggcccaaaggctggcggccgactccggagctcggcgccccaaccgggaagtgatcgcagcagcccacccgcctgacgccagcggaagtgcgagcccgggtcgagcctgctccgccgccgggcgcccgggaaggggcgggcacggggcggggctgggggcgggcgaggcggggccggcggcggggcggggcttggccgcagttgtttttacccaggcctcggcgcctaggcgctccgccgaggctgatcttcgttcaagtgtgagctgcggctgagcccagcgctcgaggcgcgaggcagccaggagggcccgtgcggcgcggggagccagcgagcgcgccttcggcattggccgccgcgatgtcagctcagtgctgtgcgggccaggtgagcgaggccgggcgcagcgcgggggttgtcagatcggagaaccgggccaggagtccaggcgtggaggacctgcctgggtgcgctcccagctccgcggccgaacgtagggcccgggtgggtcgctcgggctggccccgcggcgctcagccgtccgggaaatcctgtgccctgggcgggcgggaaggggcagggggaagcccgagaggctaccccggggtcttcccgtccggcctccgggactccgcgtggagcggggcgtgccgggctcgggcggaggatcccgactgctccaggggcgtgtcgcctcttgcgccgagcactggtgaatagcgctgagctccgtagccctctccactctgcttgtcggatgaatccaggaagaaaagtgggtttaggcaccgtctcctttgctatgccctgaataaaactcgggtcaaacaacccaggcaggttgcgcttggcatctcgtagtcgagcgtgggctctgtacctttgagaatgtctcgaagcctgacttccaaactaccgggcgcaggtctgggcgaagggaaaactcagccctgcttcctgaatttcccgacccaaccctggctcggtactagcacgactgcctgggtagggctggaaccttcctgcctctctttgcaaataaacttgttcgaacctgttttttaactctcgcctatttaaacctatgatgtcttaaaacattatgtctcctaccagttactgcatcagtgtagaattagtacgtcttagccctgtaatgctggtttcactccttcctgcagagttagaaaaaacgaagtaggtgagtctcttggatgtggagctcttttctccctttacatgtggattatcagcgtttcggtacagagttttaatggagtgttttcacgaacgaatcagactctagggagcatcctggttcggggtgttcttgctgacactcagcctttccacaatcgaggccagctgtaagtgatggagtggttaaactgtgggtttctgtaaccggcgattatactggcagataatctgtcctgtttagagtggccacgtggagctgtcttggtttttgaggtctaatactgtgcttggcatacattaaagctggccttttcagagttgaggaaattgaggcttttgacgactgagacgaaatgattttttttccctgtgtcaggcagagagagaaagagaatgagaatggtcaccaccttaccaggtatttgagaacaaggtggaccaggaaagactgttttcagaaagctctgcaaatcttttattcccgttttgaaatactttttctccaatatgatgcgacactttttattacgtagtaatgatacagctctttaggggcatctgtcctggtcccttgaagtccccttgaggctctttctgccattcccaagttcctaatttagagctctgtaattaccagtattcaaatgggttttgtaaaagaattattttgctgttgatgttttagcaggtttctaaagtctcccctcttaggactttggaaagaaccaaatcaaagttaacccctgctttcccaggcctgctggaggcatcactgtggtgggcctcagtgctgtgtgatggtgatcacactgtgatttcctgtggatggggcggtaggaagttaaaagaaaagcaaacaggctgggcgcagtggctcatgcctgtaatcccagcactttgggaggcagaggcgggcggatcacctgagatcaggagttggagaccagcctgaccaacgtggagaaacctcatctctactaaaaacacaaaattgccgggtgtgatgacgcatgcctgtaatcccagctacacagctaaggcaggagaatcgcttgaacccagaggcagaggttgtggtgagctgagatcacgccattgcactcaagcctgggcaatgagcaaaaagagcaaaactccatctcaaaagaaaggaaagcaaacaaaacctcacagcaccgtcagaagttaccaattcttgtttgtttctgtgggcacctgccttttgccaggagcctgctatatagtcataagtcagacaagcatctctgctctcaatggcctatctgggcaggggagatcattcataaacatgtaaacaatgaaacaatgaatatggtactggtactgtcagaaggccgtgtggtaagcagccttgaggagggttgccgagggagtctgagaagatgcctgtggagttgagactgctcagtgaggagaggcaagggagtctagggtggctggggtgtcttagatgaggtcagagagaagagcaggaccagaaatggccagaacctgtcagctgcctttggactttggatttaattctggttgcagtgagaggctgtgggaggattctgagcaggggcgagctgtggtttgatttgcacttagaagataattgggatgtcgtgaagactggactgtaacgggctagagtggaggtgaggaaagcagttcgagttggtcatgaagcagttggtgaggaaaacctaagtggatatttgcctcttaggggcaagcagtgttctaggcttcggcagtgaacaaaaatcctttcctgatggagctcgaatcctggcaatctgctgttgctgtagtcccaggaggagacagcgtggtaccttaatttaggctatggctgtaggagtgagtacagtgggacatcattggctttgggtatatttcagaggtagaactggatttgagcaaggattagaagtgggatgtgggaatgagacaggctcggtttctggcctgagccactgggtagatgatgatcgcattactgaggtgaagtaggaaattgttaggaagaggacatttggtgaggaaaacccaagtttcttggcttcgttacattagagatgcctattataaatttaatggaaatggcaagtcaccaattaggtatttaggtcgggagaagtttgaggtcggagagagacattttggtgactttctttaactgcggaccatcctgaacaatatgtaacccataaaagagcctgggctttggactcaggcctgggtttcaatttggaaatctggacaatgaggactggtgtgactggatgagttacttaccctctatgacctcattttacctcaactattgaatgggtacttcttagggttattgggaaaattacatgtgatgataagtgtaaagtctgtaatataggatttggcagagtgtgaggaaccccccaaatcttattagtggccattacccatctgcatcaggataatatccagatcagcttattttatttttgtatctactctgatattcactttggttttgcttaggctgttggctaatggatgctaagaaagtagagattacaggggagtggtcactcaacactttatgggttcaaagttctgtgctaggcccctagagacacggtaatgaacacagggcttccttgttctcctttaacttaagggctatgtggaggtgggagtgttgggggaagttagctacagaaaatgacagtgcaggctgggcatggtggctcttgcctgtaatcccagcactttgggaggccgaggcaggtggatcgcttgaggccaggagttcgagaccagcctgggcaacatggtgaaaccctgtctctactaaaacaaaaattagccaggcgtgatggtgcacgacctgtattcccagctacttgggaggctgaggcaccagaatcacttgaacttggaaggtgcaggttgcagtgagctgatattgagcactgcaccctagcctgagcaacagagtgagacgctgtctcaaaaaaaaaaaaaaaaaaaaaaggaaaagaaaagaaaatgacagtgctcactgtcagagcggaagtgaggtgtgtgcttggaaaatctagacaacctttccaaggcagtttgacaatagggattgggagggcttgctgcaggcaagtataggcatttatgacaataataatgctgaaatttatttcagcccacagtatgtgctttgtttttacatacattataattcattcattcctcacaaaacccctgcttggcctccttttacagatgagtcaactaaagtatagagaaataaatgaactgatgttaccaactgactgatggtagagccaggccttgcatactggcccacctgacttgagttgggtgacttttgtaccagactgctattccttattattcctatgtgaataaataatataattgctccagatggacccagtgcagttttgaataccctgctattggctgttttcgtagttattgttggctgccagtagttaatggttgggtgaggcttaacttctccctcatacctaattcaggtcataaagaccaaagtcacagaccaaattctgtcacacatacagacagtggcaggcgtatggaatagtcatgcagcctgttctgagacttcctgacattccagctctttgaccttgttggtgctctgataggcttcttgcctgaaaagttcacccgaggcagatgcgccaacattctagtaggcaagactcagctaatgtctggttggtgggcagccaagactattgcaccaggaggatcaagcccgtggttgccattctgagtaaaggttcactctgtctttttttttttttttttgagacagcgtctcattctgtcacccaggctggagtgcagtggcgcaatcttggctccctgcaacctccgcctcccgggtccaagcgattctcctgcttcagcctcctgaatagctgggattacaggcacttgccactacatctggctaatttttgcattttcagtagagatggggttttgtcatcttggccaggctggtctcgaactcctgacctcaggtgacccgcccgcctctgcctcccaaagtgctgggattacaggcatgagctactgcgccggccctattcactctatctttatagccagtttatgcaaggcaggaatgcccaggcccaggtatttccagccagatcctatttctagatcaccaagattttcctcaatgaaaacccatgtatgtatgtatgtatgtatgtatgtatgtatgtatgcatgtatgtatttaaagatgggatctagctcttgcccaggctggattgcagtggctcaatcatagctcactgcagcctccaactcctggggtcaagcaatctttctgcttcagcctcccaagtagctgggactacaggtgcgttctaccatgcctggccagtttttaaaaatttttgtagagactgggtctggctttgctgcccaggctagtaaaactcatttctgatgtccgttatgttaattaacaaagccttgaatgccaccaggaactatccatcatcaaagataaacaaagcgggacattagttaaagcagtaaaaacacgtttattcagtaactattgactgtaggggaaagagctgagctccattcgattttgtgcagaggtgactaggccttttaaagtgagcataagggagtaaggaggggagtgagcggtggctcaagagtcaggaaagtgaaaagttacaaagggttggtcgctgtaaatgcaattaggccagctgtgtggcctttgattaaatgtttgctggaataggggtcttatcagggcaactgatgcccctataatgcagcttaaaacacacacccacatacacagagtccatgaagaagacttatttaaaaaataaattacacaccacatacaataatgatgattccaggccgggcatggtggctcacgcctataatcccagcactttgggaggctcaggtgggcggagttcgagaccagcctggccaacatggcgaaaccctgtctctactaaaaatataaaaattaactgggcgtgatggcatatgcctgtaatcccagctactcaggaggctgaggcaggagagtcgcttgaacctgggaggctgaagttgctgtgagccaagatcatggcacttcactccagcttgggcaagacagcgagactccgtttcaaaaaataataataatgatgatgtttcccccaaaatgtccttccttcttcactgtaaaacccaaatctctactttgaggtcccagctcaattaatgtttcctcagtaatgatctttctcttgttttgagagtcctcacagaatttctgcttcgtggacttgattgcaccacttagtactgggtcatctgatgcattggaattaaatcctggctactgcaaggatgtttcctctcttcttataagcagagcacttattgtgacctagctgaaccccctgttgagctcttttggttacagaactcttgttccctattgctctttgtttatagtgattggaaatgttaggtcctcattatattacatggtgcttccactggaagggatccaattacaaaaattcattatttccatgatgatacttttttgaacaatgtgggaagtatttgtgaaacagagggaaatcacacatatcattacccagagagaaccacattttgatgctttatagtcagttacttatatttaatatttattattttatttttttttatttttgagacagagttttcgctcttgttgccgaggctggagtgcaatggcgtgatcttggctcactgcaacctccgcctcccaggttcaagcagttctcctgcctcagtctcctgagtagctgggattacaggtgcccgccaccacgcccagctaattttgtgtttttagtagagatggggtttccccatgttggctaggctggtcttgaactcctgatctcaggtgatctgcccgcctcagcctcccaaagtgctggtattacaggactgagccactgtgcccggccgatatttataattttactttgcaaagttgggattttgttggaagtgctgtatttgatcccactctttttgcataattatgaggtgactgataaagttttttttaacatgcacccaccacttattgtagctgttaatgttttctgggtttacattcatatgtagatagtcttctaccttcaaacttgatggtttctttttttttttggagacagagtctcgctgtgttgcccaggctggagtgcagtggtgcgatctcggctcactgcaagctccgcctcccaggttcacaccattctcccgcctcagcctcccgagtagctgggactacaggcacccatcaccacgcccggctaatttttttgtatttttagtagagacggggtttcaccatgttagtcaggatggtctcgatctcctgacctcgtgatccacccgccttggcctcccaaagtgctgggattacaggcgtgagccaccgtacccggcctgatggtttcttcagaggtgttaatgttgaatgtgtgaaagtcacttaatgagcttttgcattaagaggtttgggtgtgtttctattcccaaaaggacaaaagtaatgaaaaaaaatccctaatttcatctctgttagatggcatcattgacaatatatttctgtcattttcaacattttctttaactttgaccttttctttttacaattactttcacagataacgtctgtccaaatggtggttgagtcactgttttcctgctgtatgatggtggccatctttgcttccactgcattaacattgaggcctgtgtttcttatcactagcactggcacttttattttcctgttcatctttataaagatgtgggcacaatgcagtaaagtgccctataattgttctgtcaaggtggtgttttggttgatgttggctaaatacggtagtacccctttacttgcagttttgctttctgtggtttcagttacctgaggtctattggggtatgaaaatattaagtggaaaattccagaaataaacaattcacaggtttaaattatgccctgttctgaatagtgtgatgaaacctcactccatcccaccgggatgtgaatcaattctggccagcatctccatgctgtctagctgtctacctatgctcctcaccccttagtcacttaggagccatctcggttatcagatccactgtcgcagaattgcagtctttgtgttcaagtcgttcaagtcacctatatttgacttagtggccccaaagcgcaagagtagtgatgttggcatagtgtcataagagtttgattttattatttcttattgttgttaatctcttaactgtgcctaatttagaaattaaacttcatcatgaggccaggcaaggtggctcatgcctgtaatcccagcactttcagaggctgaggtgggtggatcacttgagcccaggagttagagaccagcctgggcaacatggagaaaccctgtctctacaaaaaacaaaaattagccagggcatggtggtgtgtgtgcctatatagtcccagctacttgggaggctgaggtgggaggatcacctgagcccagggaggtcgaggctgcagtgagccatggttgtgtcactgcactccagcctgggtgacagagtgagaccctgtcttaaacaacaaaactttctcataggtatgtatatacaggaaaaaacacagtatatatggggttgggtactatccacactttcaggcatccactggggatcttggaacacatcctccttgggtaaggagggactactctgtatagctcactggtgagctgatacaggaagggtggcttaggagtgtctttgtgtagtgtagctaaattcaggttgtcaggtaatcctctgtcacttaccttgaacagtatggagagtgaaggttgcactcttagttggagagttgcttgatggttgctcattcaaatatgttttcttgggcagctctgtagctgacctgtccagctgacaaatagctttggactgcagcaagtctgactttgtaggcacggttgaggagaggccagtctgtaggcgtggaaggcagcctctgactcatctctctgtgctaattaaataaaaggtaacacccccttccccattgcttgctttccgccctcgttttctgtatagaggctgtagatttcccacagatactgagtatctgggagtgactatgagacacggaagctttactttccagttttccaggtattttaatgtagtcaccagttagagcctcagaaagggcactgcagtaattatggcattgtctacttttatttcagagcagtatgtggccagatcatctgtgataacttgatgttaaaaaggaagtcttcatataagctgatatgtctacagaactagccattggatgtaattctttgaccaagctatttttagtactttaagtggccatacctgcctaattgtaaagacccagtgttttcttagtgttctgagtcaagccgcattgttggtgaattttacatattgctgtttgcagttgaatttagggttatgattggatcctgagaacagtatcaatcaagttacctctctaaatcactgtgattgttcccaaatattaggcatcccaagtagcccagagtaaacctttgctgccctgcttaaaatgtattttaaaacatttacagtgagaatatccccatattcttctagcttatatattaatgatatttcaaaacattttagaacttaatctgagagtcagtatagggcagtaggaaattcaaatactgagttggtgtgattacacagaacatctgtttgaattttaaagggaagcaggattttacttttggcttttcttccgtagtttgccttgtgagattaaaattgctgatgtttaaggaaagcagctgttgtggaaagacttagtgggtttttatcagagagtaaattttgaaacaatttgtgggtttttgaagtaaggttacagtatatagtgattagacagcattttcactctctcatgaaaactgtgtagtcaaaacaaaagtaggaaaaacacatgcataaccccttaaatcttatttatgaaaagataactagcgaagatgggaaaatcagacttgtgtttaagtatcatttttttataaactagctaagtgcattttgaaacaaaattcatgaggtctttgtggaatgccttttccatttttttgttttgttttgttttgtttttgcactcacattatgtctcagcaatttaatggagggctgatttcctaatgctttgatccttggtgagtgtggttcaccccaactagggaggaattcagtcttttgttcttgattccatgctcattgatctcctccactgccattctcagaaacaatggcagtattttgtttccatagtaatgaaactgtttgctctaataggattctatagtggtaatttttctttagctttgctagccttatccctaaggactctaggactttgttggacttattttgttagctgttactcttttttttttttttttttttttaaagagctgacaatccctaaagtaaaatgtcaattgataaatattctctggggccaggtgtggtggctcacacctgtaatcccagcattttttggggctgaggcgggtggatcacctgaggtcaggagttggacaccagcctggccaacatggtgaagccccgtctctactaaaaatacaaaaattagccaggcatgatagcacatgcctgtaatcccagatactcaggaggctgaggcacgagaattgcatgaacatgggaggctgaggttgtagtgagctgagatcatgccattgcactccagcctgggcaacagagtgagactcagtctcaaaaaataaaaaataaaaaaaaataaatattcactgggtgcctagaataatgaagttcagaggctgtatgtagctagccctgcttgtgcttgggagtgacttgtgaatagatgctgaatttgctagcctatgagactgtgcctgggccagtgcttcttcacagactggattgagggtttgtttgcctcagctttgcaccttttatcttttggaaaaggagtagaagctgggggtcccttggcagggacatttgcccccagaagtggatgagcccatgcaggggagcacggggagagtgggtcctctttcctgaatgggctctagagatccatgcaatcctgcagttgcacacacagttgtgttgtttatgtcctgaacacttttccaagaagaaagtccccatcatttctcagcttctcaaggaaatctcacctcaggaaaaaacagctgtagtacgagaaggaaagcctaaccttggaaccttgagaaacatctccaattcaaaaggcacacattccctgtagccaacagggaaataaaggaaattaagtgaaggtagagcctgcctggagggtggggagaggtgtggagccaactggcctggtcagacgacaacttgaagtcaagtgagagaggaagatcgaagatcagtgcctgtggattttttgagagtgctggcttgtctggaggctgaggtgggaggatcgcttgagcccaggaggtcgaggctggatgagttttgatctgcgacactccagcttgggcggcagagtgagaccatgtttctttttttgtttgtttttgtttttttgagacggagtctcgctttgtcacccaggctggagtgcaatggcacgatctcagctcactgcaacctctgccttctgggttcaagcgtttctcctgcctcagcctcccgagtagctgggattacgggcgcatgccactaggcccggctaatttttgtattttttagtagagatggggttccttcatgttggtcaggctgatctcgaactcctgatcaacccgcctcagcctcccaaagtgctgggattacagacgtgagccactgtgcccggccgagaccatgtttccaaaaataaaaaaaagagtaaggccaggtgtggtggctcctgtctgtaatcccagcactttggggggctgaggcagcgtatcacttgaggtcaggagtttgagaccagcttgaccaacgtggtaaaaccccatctctactaaaaatacaaaaattagccaggcctggtggcagacatctgtaatcccagctactcaggaggttgaggctggagaatcgcttaaacctgagaggcagaggttgcagtgagccgagatcgtgccattgcactccagcctgggtgacagaacgagaccccatctcaaaaaaaaaaaaaagtgcttgggggttttggcagcctcagtttccaggcagcagaaggtagagaaatgctggggagctgaggaactgaagccagggaggggaggttattatcttttaagataaaaggaagcacagattaagagcctaaagaggtctgggctgggcctaaaaggatggtagtaggaaaacagcttcctgcccccaaattgcaggatgctgaagtttaactattctttaagttctgccaaaatcgagtccaagggtagccctccatccccttttttcttcagagaaatcccccactttctgtgctcccccaccgtctactttttctatgaaagtttgtggaatctcatcaactgggattcagttctttgaaaaattctgtagaggcaagtctggttctggagagatccaggttttgctgcttgcttattttattttgttttatttatttatttatttatttatttatttatttatttatttatttaaatagagacaggctctcactatgttgcccaggctggtcccaaactcctgggcttaagcaatcctcctgccttggcctctcaaagtgttagaattacaggtgtgagccaccatgcccagccttgcttgatttttgaggcaggttatggaaccacagaaactcttggaagataccttaaaaggcatctgtttttttttaatgacccatctgaagcttagatgtcctttttaatgcccctcttcagtgtgcatctgtgtttgaatctgtccagtgctggggagctcactactgttcctagttcttaaattttcttgttaagtaggggaaattcctgtcttgtctccctaatgttgttaaagagataaaatcccctttaacaatattagtgattgttgaagggatgcaaatcagatgttttatgtaagagtctttttttatctgtaaagtggtgatgcagtgtgtcagggttcagtgtaggaagccaacatcactctaggtattttaaaaagaagaagatttactatagggaattaggtatgtttaaaaaataattgtagaactaaaggagcaagaatgaaggggccaccccctgggactcttgaacttatgaatgttgcctaaagaccaggggttctctctaggtcctgctgctcagcacacaaaaagcccacgactgagatcgacaaggattgccaaggaagaaggctttaatcgggtgctgcagccagggagataggagctcagtgtcaaatctgtctccctgacctactaaaactagaggtttgtatagcagggaagaaatgtaacaatgtgtaacattttgagatgcagtcttgctctgtcatttaggctggaatgcagaggcctgatcttggctcactgcaaccactgtctcccaagttcaagcaattctcatgtctcagcctctggagtagctgggattacaggcatgtgtcaccacgcccggttactttttttatgttatatattttttttagatggagtctcactctgtcacccaggttggagtgcagtggtgagatcttggctcactgcaacctccgcctcctgggttcaagtgattctcctgcctcagcctcccgagtagctggaactacaggcgcatgccactacacttggctaatttttgtatttttagtagagacaagctttcaccatattggccaggctggtctcaaactcttgacctcgtgatccacccgcctcggcctcccaaaatgctgggattataggcgtgagccactgcgcctggcctaatttttgtatttttagtaaaaatgggatttcgccatgttgaccaggctggtctcgaactcctgacctcaaatgatccacccaccttggcctcccaaagtgctgggattacaggtgtgagccaccacacctgacctatttttctaaaagggtcttttttttagtatttggtagatactaatatagccataccacccttttggctttcaactaatctgtctttatacttaaaagtatgctttttatagacgtgatagaactgggtctttcttgctttttaatccaatctgacaatctttgcctttttgttttgtttcactttttttgttttgttgtgttttcagatgggatcttgttccattgcccaggctggagtgcagtgatacgttcacagctcactataccttcaatgccctgggctcaagtgatcctcctacctcagcttcccaaggagctaggactacagatatgcatcacctgacatggatttttttttttttaattctcttttgtggagacacggtcttactatgttgcccaggctggtctcaaactcctgggctccaagtgatcctcctgccttggcctcccaaagtgctgggattacatgtgtgagccattgtacccagccaatctttgtcatttaattggatgcttggatcatttacatttaatgtaattactcatatgtttgagtttaaggctataaattgttgatcagtttccatttcatttccccttcttttttttattcctattaattattttttagcgatgggttctcaccctgtcacccaggctggggtgcagaggtgcaatcatagctcactgcagcctcaaactcctttgctcaggtgatcctcctgcctcagcctaccaagtaactgaaacctggctcatttcctcttctgttctttgttcttatctttttttgaggagagggctaattgaatatttttcactgtgtttatatgcctttttatttcttcttcttattattatttgagacggagtcttgctctgtcaccaggttgaagtgcagtggcgcgattttggctcactgcaacctccgactcctgggttcaggcaattctcctgcctcagcctcccgagtagctgggattacaggcacgtgccaccatgcctggctaatttttgtatttttagtagagatggggtttcattgtgttggccaggatggtctcgatctcctgacctcgtgatccgcccaccttggcctcccaaagtgctgagattacaggtgtgagccactgtgcccagccttgcctttttatttcttaagatgttctaaggattatagtatgtagcaccttgaaaaagggagaagcatcaaaacttttatcattagtgatggaaaccaatcgctaggtaggcagatcaatttactagatactgatttaatcttgaaatgatgaattaagtaacatgatatgaaaactaacttaaaaacaatattttatgctttacagaaatacacggccgagcacagtggctcatgcctataatcccagcactttttggggactgaggtgggcggatcacttgagcccaggagttcaagactagcctgggcaaaatagtgagaactcatctctacaaaatatcaaaaaattattcaggcatggtggcatgcacctgtagtcccggctgctcggcagggggatgaggtgggaggatcacttgagccaggctgaggaggtcgagactgcagtgagccatgatcttgccattgcactccagcctgggcagcagagggatacctgtttatatgatttaattaatcatacaaatgtttattttattttccttttggacatttagtgtaatttttaagaatgaatgtaaatactctacactagagccctggaaatagttctgctacaatacaacatgacatacgcattctaaaaattaccacattaagcagaactgcacaatgaaaccacaggtctcacggggaaaatttggttaagggcacaatattctaaaactttgtcagtgacacatctgaaaaaaggaactgaataaaaatgatatagttttataaatgttaaatggttaagaaatacataactactatggtaaatttggcattttatttgaaaaagtcttcaaattaccttgtggaaatgggtttggagagttaggcttttgagcagttgagaagcagtgggaggaaggttatctggaattggatggaaagttgtaacatcaaatgtgtttggtgtgactcagtgcacttgttgagctgagctgtgtgcattttttgtgtattaccacgaagctcaattcagcttggtgcagttttctacctggtgtttctcagtagacagaaatgcacatcctattatgcctaattgttccgtaacatatccatcctgttggagcaattttgtgttttcaaagtaagtatagaataaatagctcagaagccttggacttgcagagcttcaggaaggctgaccaagccttgctcctgttagctgtctgagggagagagctggccccactgacttcctttggaccacctcccagaaaattggcgctggaagggtcttctgttcttctgacccaattgtgctcgatttcttgtaccataataaacaaacaactccagaggcaggaacttcctatctttgaaggcagctctacttcacccttagggagatctggtttaattcttcttcctgctggcttctcaaggctgtagtgacttgcctgtatcctggggagggatacagctatttttgtataataaagttaaaagaggcggagtggaaggtgggcatggtctgtggctcctggctcatagggtaccacaatttggttgatattcctgtttctgattgtaagaatccagtttcctttttagttcataagcatgatgattgggttttcatgcttgtctgtgagatgtgcctcccttaaatcttgtcatgtcgttggtacattacccatgtgacatgaaaaaaaaaaaaaaaaagaatcccagtgttcacccaaaccataaactgaaaattgggggcatgctgacaaagggggattgtgcctctgggtatgagaaatttcactaagaagccaaaatatcagaccttttagcacactccaatagtttttaaggataatggtcaggcagtttgaaattagaaccattgtgggaagtctttggttggcagccagccagagaaagtctcacagctgctgatgaggtttctgatgggcgtaatgcccgttgctccgggtcctgcgttgccattctcagatggcttatgggctgtccatggggttgtgagaatctgggaagtcacagtctaattctggagctagaaggatccttaaggcagtggcatatccacctaataagtttttttcaggaaacaggtcctggagcacagggtatcttccaaggccacacagctagtcagctcacagcaggtactacccctgtgctctcctagcctttgctattttccaatgcccagtacacacttggcctttggtaaatgacgagagcgtgaatgagtggatgttgggcttttcccaaagataatctgctgtctgtgcagagcagttcaacaaagagctcatagctatggattttaaacacagtcttatgatttgattatttgaatctcggattgggttttttttttttttttttttgagatgaagtcttgctctgtggctcaggctggagtgtagtggcaggatctcagttcactgcaacctctaccctctgtctccagggttcaagctattctcctgcctcagcctcccaagtagtgggattacaggtgcctgccatcacgcccagcaaatttttgtattttagtagagatcgggttttgccacgttggtcaggctggtctggaactcctgacctcaggcaatccacctgcatcagcctcccaaatgctgggattacaggcatgcgccaccatgcctggctctggattggggttttatactgtattttgttgtaataaaatctgtttaaactttttgttcccttccttctcttaaactctcaagcagttgtttaagttattttccagaaagttctgctctatgcgtggatgatagaatttaacagaaagcggtttctaagagtgtactatctcaccgttagtgtagttggcggaagttgcaggttgctgagtaaggggtatgaagccatttaaatgaggcactttatgcaaatcattttgcctagcagcggcttctggctggaggctttgaaaagcatgaagctgtaaattatttccttatgatggggggcggggaggaatgagggttgccacgggattgcaatttttcttttttcttttctttttttttttttttttttgagacagagtcttactctgtcgcccaggctggagtgcagtggtgcgatctctgctcactgcaatctctgcctcccgggttcaagtgagtctcctacctcagcctcctgagcagctgggactacaggcgcgcgccaccacgcccagctaattttttgtatttttagtagagatggggtttcaccatgttggccaggatggtctcgatctcttgacctcgtgatccacccgccttggcctccccaaagtgctgggattacaggcgtgagccaccgtgcctggccgattgcatattttttggaagcaagagttccagcagggctgagtctctgacttctttttttttttcttgcagaggggtgtggcagatagctggacccagggcttgagaggaacaccaatgctcatttcatttgcctttcattatggattgcttgagggtattctctgattattagagagaactggcaactggtggggaggtggctcttgcttgtaatccccagtactttgggaggccgaggtgggcggattacttgagcccaagaattcgataccagcctgggcaacatagtgaaaccccatctctacaaaaaaatacaaacattagatgggcgtggtggcgtgcacttgtagtgctagctactctgtaggctgaggtgggaggatcacctgaggctgggaagttgaagctgcagtgagccatgattgtaccactgcaacccagcctgggtgacatgacaaaagacatgaaaaaaaaagagagagaaagccctcttcttctcttcttagcatttcattctccttttttgatgtttgtaaaacaattagagagtcctgtgcaaagctgatatttaacttacccccagatgccaatagcactcaccagtctttgtgaaaacactgcccctgcctttactaccaaggatgcacctgacccctggggcaggcagtgatactgcccagaaaagaaacactggggccgggcgcagtggctcatgcctgtaatcccagcactttgggaggccgaggcgggtggatcacctgaggtcagaaattcaaagaccggcctggccaacgtggtgaaaccccgtctctacaaaatacaaaaaagttagcccggcatgatggcgggaggttgaagcaggagaatcgcttgaacctgggaaatggaggtttcagtgagatgacaatgcaccattgcactccagcctgggcaacagagcaagaccttgtctcaaaaaaataaaaaaagaaaagaaaagaaaaaagaaacactgggccaggtgcggtggctcatgcctgtaatcccagcactttgagaggcggaggcgggtggatcacctgaggtcaggagttcgagaccaacctgggcaacatggtgaaacccccgcctctactgaaaatacaaaaattagctgggcgtggtggcgtgcacctgtaatcccagctacttgggagactgaggcaggagaattgcttgaacccaggaggtggaggttgcagtgagccgagctgccatggcactctagcctggacaacagagcgagaatctgtctcaagaaaaaaaaaaaaaaaagatttaggacttaagctacttgaagtatttgatgggaggaaaaggacaaacctgctttctactgagaattaatttaaacatatttttggtgtggattttttaggcttttttgtgcatatagttcagaggcggtgtagctgagaagttaagagccagttctaatgataggaagcctgagttccggtatgttctcagccatttactggtggtgtgcccttgatcagttacttcatctgtctgttgtttagtttgtacatctgtaaaatgggataatccctaggatctcttttataggattttgcgcttggaacagtggctggcccacagtatgagttcataaatgttagatgttgtagttttggggaggaccgtcactctcccttgggatactgatatccaaattgtaagttgtcagtaggctttctttgaagtttgctccacaccctttccattaaaataagtaatgtgtagatccagtatttaaccgtgataaaatgggttaaaaaggagtccattaaaagtattgagaaaagatgggtgaacttttaaaataatctaaaatggccaagatttttctaagcatgacacacagttattcgtagaacagggatccacttgccttaatttgcacagtgttcttataaatcaacagaaagtacacataacagaaaaatttaaaaggttagggatcatttaggaaaaaatgcaaatgccaacaaatgtgagaaaatgctcaatcttacttataatttaagaactacaattcagccaggcgcggtggctcatgcctgtaatcccagctacttgggaggctgaggcacgagaattgcttgaacccaagagggagaggttgcagtgagccaagatcatgccactgcactccagcctgggcgacagagcaagacttgtctcaaaaacaaacaaacaaaaaacaacaaaaaaattaccattaaaaatgagagagttttcattggcaaagttaaaaagaaaggtgaaagaaaaacctactcttcttgatttgtgtttgttcacttatggagaatttattttgtcataatgtctgaatcataattaaatatgttcttgggtctagcagttcttctatttcttgtattagaagtaaacttggaacatcttaaacactgataatgaagactaatttgaaataaaaagttactagcctttcatacaatgaaatatgttgccgttaaaaagaatgaaattaacaatggaatattatacagccttaataaagaaggaaaacttgtcacatactacaacgtggttgcacctcaaggacattatgctaagtgaaataaaagtatacaataaaagtcacaaaaggacaaatactgtatgattccactcatatgaagtgtctaaagtagtcaaaatcatagaaagtagaaaggtggttcccaagggcccagaggaggtaggagggagaacttgtgtttagtgggtatagcgattcagtgctgcgtgatgaaaaagttatagaaatctgttggacaacaatatgaatatacttaacactactgaactgtacacttaaaagtggttaggatgataagtttaatgttatgtgtgtttcagcatagtaaaaaaaaagagtaagttaaatctgtgaggaacaggtagccaagataacagtgttagttaagtaggggttataaaaagaggaggttaaagaacactgtgtctatgatgaacccaattatggtttccaatttgaaaggcatgtatgtatccatgtatgtaggtacatatatatgcaataattctgagagttttaaagatatcctagaaactgccaccggtggttacagcaatagagtaataataggaggttggagggtaggggataacgttgggggcatttgtttttcattcaacaactttaaagcttattttagcaaacctaaatgtgcgaaattcatcatgttttataattgtatttgctagcactgttttcattttgatatcatccctgccctttgtggtgggagtggtggtagtgtgtgatgtgtttagaagtgggtttggagataacagagtttaacacatttttgcattagaaaggaaacatcaatttggttgcacaactggtatgaatatgtggtgtaatttatttttatcaacattgtctacaatttacatatgtaaatgtagatttttcttaagtgtagtgaggtgaatggaactggaaaaaacgggtacgccaatcctaaaacaatggtgctaagattaaactgtcagatcagtctttgtcaagtgctccagctggctgtggattattaggaagtattattcaaagggctgctttggtacaagacaagaaaattgctggagaaatgactgctctggtgctaagattcagccatttcaaatgtgcagtctcttaaaagtaaaagttggggtcgggcatggtggctcacgcctgtaatcccagcactttgggaggctgagacggacggatcacgagttcaggagtttgagaccagcctggccaatatggtgaaaccctgtctctactaaaaatacaaaaattagctgggcatggtggcgggcacctgtagtcccagctactcaggaggctgaggcagaagaatcacttgaacccgggaggcagaggttgtagtgagccgagatcatgccgctgcacaccagcctgggcgacagagtgagactctgtctcaaaaaaaaaaaaaaaaaaaaaaaagtaaaagttgaaagatctataaaatacttcctgtaaactttacaaagcattttacagcagactaataacttaagaaacatatgaagcaatttcagctcctaaagtcctaggaatttgcttttggggatactttttatttataggatacttcctatttatttataggatacttcctatttaaattaacaagtgttcaaaaaaaaagtcctagttttatttttattcttaaagtggcattggagagatgtccacacttgcacttctctaatgagcagagatgtccaaccaagtgattttagaattattgagttttttttaaacttatcctaaaatggctattaggttatttttaactaaagaaattattattgtttttttgagatggagttttgctcttgttgcccaggctggagtgcaatggtgcgatctcagctcaccgcaacctccgcctcccgggttcaagtgattctcctgtctcagcctcctgagtagctgggattacaggcatgcaccaccatgccctgctaatcttttgtatttttagtagagatagggtttctccatattggtcaggctggtctcgaactctcgacctcagatgatccgccctccttggcctcccaaagtgctgggattacaggcgtgagccaccgcacccggccttaaagaaattattgctaaagtaaaaagtagtttcacatagcatatacagcccagtcatttaaagtgtgcaattcagtggttttatagtatatttacagagttgtggaaccatcatgacaacttagtttttgtcacctctatgcttattagcagtcactcccagttccctcccaaactccctcagagccctggcaattgttaatctacttgctgtctctatgggcttttgtagacgtttcctattaatgaaaccatataatgtacagtctttaggactacttctttaacttagtatgttctcaaggttcatccatgttgtagcacgtgtcagtacttcattcctttttattttttttttttgagatggagtctcgctctgtcaccaggctggagtgcagtggcgtgatcttggctcagcacaacctctgcctcctgggttcaagtgattctcctgcctcaacctcctcagtatttgggaatataggtgtgtgccactatgcccagctaattttcatagttttagtagagatggggcttcactatgttggccaggctggtcttgaactcctgacctcatgatccacccgccttggcctcccaaagtgctgggattacaggcgtgagccactgtgcctggccagtacttcattccttttactggaatataccacactttactgaaacccattccttgctgatgatcatttgggttgtttccactttttttttttttttctttgagacagagtctcactctgtcgcccaggctggagtgcagtggtgtgatctcagctcactgcaagctccacatcccgggttcttgccattctcctgcctcagcctcccgagtagctgggactacaggggcctgccaccatgcccggctttttttttgtatttttagtagagacagggttttacggtgttagccaggatggtcttgatctcctgacctcgtgatctgcccgccttggcctcccaaaatgctgggattacaggcgtgagccaccttgcccggccttttttttttttttttttttaagacagaatcttggtctgtttctcagggtggagtgtggtggcacagtcgtggctcactacagccctgaaccctcaggctgaagtgatcctcctgcctcagcctctcatgtagctgggaccacaggagcatgccatcatgcttggctaacttttttggtattttatagagatgggatctcactatgttgcccaggctggtctccaactcttgggctcaggtaatcctcccttcttggcctcccaaagtgctgggattactggcatgagccactgcacctggccattcttaatgagttaatttttgtctggtatggggaaagggtccaacttcattgttttgcatttgaatatccagttccaccaacatttgttgaaaagactattctttcccagttgaattatcttggcagaattagttgactgtcagtgttaagctttatttctgggttctcgattctattgattttttttttttttaatttgactgtacgttggaagaattattcatctggaatttagacctactggggctggtggtcatgacgctggaggttgtgttttgggaactggtgaccagtcattcttagatggctgactcattttttttgtgaccatgagatttaaacatttatagagatttaattgtaagtaacaaaggcctgcagtagatgctgttacaggcatgagaaatgattttgtttatacagatcacaaactataaatacagtggcagtggtcactggagccatccatatatcacagttaaactgttctcctgagtaatggggttgtcagcactgaagtacacttccttgccatgtggagcagtagccggttctttatttaatattttcatttactaagcaataacttaattggaaaatgaattttgattgggttttctatagttaactgtttcttaaaagtactattccctttttctcttttccacattcactttggtgaggtagttaagaatactggctttgaaactacctggggctgttgcagtggctcacacctgtaatcccaccatgtgagaggctgaggtaggaggactgcttgaagccaggagttcgagaccagccgggcaannnnnnnnnnnnnnnnnnnnnnnnnnnnnnnnnnnnnnnnnnnnnnnnnnnnnnnnnnnnnnnnnnnnnnnnnnnnnnnnnnnnnnnnnnnnnnnnnnnnnnnnnnnnnnnnnnnnnnnnnnnnnnnnnnnnnnnnnnnnnnnnnnnnnnnnnnnnnnnnnnnnnnnnnnnnnnnnnnnnnnnnnnnnnnnnnnnnnnnnnnnnnnnnnnnnnnnnnnnnnnnnnnnnnnnnnnnnnnnnnnnnnnnnnnnnnnnnnnnnnnnnnnnnnnnnnnnnnnnnnnnnnnnnnnnnnnnnnnnnnnnnnnnnnnnnnnnnnnnnnnnnnnnnnnnnnnnnnnnnnnnnnnnnnnnnnnnnnnnnnnnnnnnnnnnnnnnnnnnnnnnnnnnnnnnnnnnnnnnnnnnnnnnnnnnnnnnnnnnnnnnnnnnnnnnnnnnnnnnnnnnnnnnnnnnnnnnnnnnnnnnnnnnnnnnnnnnnnnnnnnnnnnnnnnnnnnnnnnnnnnnnnnnnnnnnnnnnnnnnnnnnnnnnnnnnnnnnnnnnnnnnnnnnnnnnnnnnnnnnnnnnnnnnnnnnnnnnnnnnnnnnnnnnnnnnnnnnnnnnnnnnnnnnnnnnnnnnnnnnnnnnnnnnnnnnnnnnnnnnnnnnnnnnnnnnnnnnnnnnnnnnnnnnnnnnnnnnnnnnnnnnnnnnnnnnnnnnnnnnnnnnnnnnnnnnnnnnnnnnnnnnnnnnnnnnnnnnnnnnnnnnnnnnnnnnnnnnnnnnnnnnnnnnnnnnnnnnnnnnnnnnnnnnnnnnnnnnnnnnnnnnnnnnnnnnnnnnnnnnnnnnnnnnnnnnnnnnnnnnnnnnnnnnnnnnnnnnnnnnnnnnnnnnnnnnnnnnnnnnnnnnnnnnnnnnnnnnnnnnnnnnnnnnnnnnnnnnnnnnnnnnnnnnnnnnnnnnnnnnnnnnnnnnnnnnnnnnnnnnnnnnnnnnnnnnnnnnnnnnnnnnnnnnnnnnnnnnnnnnnnnnnnnnnnnnnnnnnnnnnnnnnnnnnnnnnnnnnnnnnnnnnnnnnnnnnnnnnnnnnnnnnnnnnnnnnnnnnnnnnnnnnnnnnnnnnnnnnnnnnnnnnnnnnnnnnnnnnnnnnnnnnnnnnnnnnnnnnnnnnnnnnnnnnnnnnnnnnnnnnnnnnnnnnnnnnnnnnnnnnnnnnnnnnnnnnnnnnnnnnnnnnnnnnnnnnnnnnnnnnnnnnnnnnnnnnnnnnnnnnnnnnnnnnnnnnnnnnnnnnnnnnnnnnnnnnnnnnnnnnnnnnnnnnnnnnnnnnnnnnnnnnnnnnnnnnnnnnnnnnnnnnnnnnnnnnnnnnnnnnnnnnnnnnnnnnnnnnnnnnnnnnnnnnnnnnnnnnnnnnnnnnnnnnnnnnnnnnnnnnnnnnnnnnnnnnnnnnnnnnnnnnnnnnnnnnnnnnnnnnnnnnnnnnnnnnnnnnnnnnnnnnnnnnnnnnnnnnnnnnnnnnnnnnnnnnnnnnnnnnnnnnnnnnnnnnnnnnnnnnnnnnnnnnnnnnnnnnnnnnnnnnnnnnnnnnnnnnnnnnnnnnnnnnnnnnnnnnnnnnnnnnnnnnnnnnnnnnnnnnnnnnnnnnnnnnnnnnnnnnnnnnnnnnnnnnnnnnnnnnnnnnnnnnnnnnnnnnnnnnnnnnnnnnnnnnnnnnnnnnnnnnnnnnnnnnnnnnnnnnnnnnnnnnnnnnnnnnnnnnnnnnnnnnnnnnnnnnnnnnnnnnnnnnnnnnnnnnnnnnnnnnnnnnnnnnnnnnnnnnnnnnnnnnnnnnnnnnnnnnnnnnnnnnnnnnnnnnnnnnnnnnnnnnnnnnnnnnnnnnnnnnnnnnnnnnnnnnnnnnnnnnnnnnnnnnnnnnnnnnnnnnnnnnnnnnnnnnnnnnnnnnnnnnnnnnnnnnnnnnnnnnnnnnnnnnnnnnnnnnnnnnnnnnnnnnnnnnnnnnnnnnnnnnnnnnnnnnnnnnnnnnnnnnnnnnnnnnnnnnnnnnnnnnnnnnnnnnnnnnnnnnnnnnnnnnnnnnnnnnnnnnnnnnnnnnnnnnnnnnnnnnnnnnnnnnnnnnnnnnnnnnnnnnnnnnnnnnnnnnnnnnnnnnnnnnnnnnnnnnnnnnnnnnnnnnnnnnnnnnnnnnnnnnnnnnnnnnnnnnnnnnnnnnnnnnnnnnnnnnnnnnnnnnnnnnnnnnnnnnnnnnnnnnnnnnnnnnnnnnnnnnnnnnnnnnnnnnnnnnnnnnnnnnnnnnnnnnnnnnnnnnnnnnnnnnnnnnnnnnnnnnnnnnnnnnnnnnnnnnnnnnnnnnnnnnnnnnnnnnnnnnnnnnnnnnnnnnnnnnnnnnnnnnnnnnnnnnnnnnnnnnnnnnnnnnnnnnnnnnnnnnnnnnnnnnnnnnnnnnnnnnnnnnnnnnnnnnnnnnnnnnnnnnnnnnnnnnnnnnnnnnnnnnnnnnnnnnnnnnnnnnnnnnnnnnnnnnnnnnnnnnnnnnnnnnnnnnnnnnnnnnnnnnnnnnnnnnnnnnnnnnnnnnnnnnnnnnnnnnnnnnnnnnnnnnnnnnnnnnnnnnnnnnnnnnnnnnnnnnnnnnnnnnnnnnnnnnnnnnnnnnnnnnnnnnnnnnnnnnnnnnnnnnnnnnnnnnnnnnnnnnnnnnnnnnnnnnnnnnnnnnnnnnnnnnnnnnnnnnnnnnnnnnnnnnnnnnnnnnnnnnnnnnnnnnnnnnnnnnnnnnnnnnnnnnnnnnnnnnnnnnnnnnnnnnnnnnnnnnnnnnnnnnnnnnnnnnnnnnnnnnnnnnnnnnnnnnnnnnnnnnnnnnnnnnnnnnnnnnnnnnnnnnnnnnnnnnnnnnnnnnnnnnnnnnnnnnnnnnnnnnnnnnnnnnnnnnnnnnnnnnnnnnnnnnnnnnnnnnnnnnnnnnnnnnnnnnnnnnnnnnnnnnnnnnnnnnnnnnnnnnnnnnnnnnnnnnnnnnnnnnnnnnnnnnnnnnnnnnnnnnnnnnnnnnnnnnnnnnnnnnnnnnnnnnnnnnnnnnnnnnnnnnnnnnnnnnnnnnnnnnnnnnnnnnnnnnnnnnnnnnnnnnnnnnnnnnnnnnnnnnnnnnnnnnnnnnnnnnnnnnnnnnnnnnnnnnnnnnnnnnnnnnnnnnnnnnnnnnnnnnnnnnnnnnnnnnnnnnnnnnnnnnnnnnnnnnnnnnnnnnnnnnnnnnnnnnnnnnnnnnnnnnnnnnnnnnnnnnnnnnnnnnnnnnnnnnnnnnnnnnnnnnnnnnnnnnnnnnnnnnnnnnnnnnnnnnnnnnnnnnnnnnnnnnnnnnnnnnnnnnnnnnnnnnnnnnnnnnnnnnnnnnnnnnnnnnnnnnnnnnnnnnnnnnnnnnnnnnnnnnnnnnnnnnnnnnnnnnnnnnnnnnnnnnnnnnnnnnnnnnnnnnnnnnnnnnnnnnnnnnnnnnnnnnnnnnnnnnnnnnnnnnnnnnnnnnnnnnnnnnnnnnnnnnnnnnnnnnnnnnnnnnnnnnnnnnnnnnnnnnnnnnnnnnnnnnnnnnnnnnnnnnnnnnnnnnnnnnnnnnnnnnnnnnnnnnnnnnnnnnnnnnnnnnnnnnnnnnnnnnnnnnnnnnnnnnnnnnnnnnnnnnnnnnntttttcctttttctctcttttcttcctttatgttttctctacttattttgtcttttcctcatttttcagtcagtatagcttataaaattttttctgattataaaagtagggcataggccaggcgcagtggctcatgcctgtaatcccagcactttgggaggctgaggtgggtggatcaccttaggtcaggagttcaagaccagcctggccaacatggtgaaaccttgtccctacaaaaaatacaaaaattagccgggcgtggtggggggcacctataatcccagctactcaggatgctgagacaggagaattgtttgaacccgggaggtggaggttgcagtgaactgagatcatgccactgcactccagctctgggcaacagagccagactccatctcaaaaaaagtagggcatattatgccaaaaatttaaattataatcctcttacttgtgaaaaatggcaatatgagtatttacttcatgggattattgtgaggatgaagtaaatccatgctaagaactgaggaccctacctggcacctagaaaatgcacaatgcaatttcctattatttaaaaaaattattattagtatcactgccacaaattacaagaagaatgaagaatggctttcggaacggtggtgggatgcccaaggctgtgctgtgttctcgcagaaagcattgggaatggcacatctcaaggtcaggactagccctcacaaggggcagcatccagtgggctcttctgactgctgtaggtgcatgcacctgttttagggtctctcttgattttatgtttctataggggagtaggtggaggaggggtcaaaacagtatattccagatatcctgagatctggtgaaggaaaactggttttggaatcctgttgggctctggaatcagagatcaggattttggtttatcccaaagtggcttctggaaagtcggttaacctctgagactcagatttcctcatctgtcaaatggagattgtgatacttctatcaaagggttatttttggccggatgcagtggctcatgcctgtaacatggcaaaaccccgtctctactaaaaaatacaaaaaattagccaggcatcatagtgtgcacctgtactccagctacttgggagtctgaggcacgagaatcgcttgaagtgggagttggaggttgcagtgagctgagatcgtgctaccgcactccaacctggggggacagagtgagacactgtctcaaacaaaaggcaggggggtggtttttttttttcctttggggagattaaatgaaaggtcttgaaagcaccttagagtagtaccttgatacataggaagtacttaagaaatgataggtaactattacttataatgagtgctgggtagaaggatctccttggttaccaaagacactcacatctttaattttggtgtttcgatggaagcacaggatataattctctgcctccttaaattgttgaacgtgctgcaaagtttgacatttagaaatagaactagggctgtggggctttgttccgtctttagggctttgttctctgcccttgcgtacacactcgtgtgcatgtgtgagtgcatattacacaggtgcatgggataaccctactcttttaaggcagtatggaagtagcaaagctgctgtctttgtcttttcgggtgttgctggtctcctctgtcagcaccatcaaggctttgctgctcattgcactcatccagcagggtgctatcaggaagaaggagaatgagttccaaaaataaggtaacttattcaggcttcacatttgtctctatgttgggaatgatgctactctccctgcctgccttgtggaatggttataaagatagaatgagaggaaggttgtgaaggtgtgatcaaggtgttacaccaatcattaaacattataaagtattgcaaacaaatggacttaggagtcacctgactgaggcagaaattccagttctatttaataggtttgtctgtgttatttgatccactttctcattataatagaggtggatgataacagcatagggctgtgataaacattaaattctgtaacttatgtaaagaatctagtgaagtatatgttgcacataacaggtactcaaaaagttgtgtttgggttagtcaggagtttgagaccagactgggcaacatggtgaaacccagtctctactaaaaatacaaatgttagctgggtgtggtggcgtgcccctgtaatctcagctactcgggaggctgagtcaagagaattgcttgaacctgggaggcagaggttgcagtaagccaagatcacgccattgcactccagcctgggcaacaagagcaaaacttgtctaaaaaaaaaaaaaacaaaaaaaaacaaaaaaaaaaacgctgggcgtgatggctcacgcctgtaattccagcactttgggaggccaaggcaggtggatcacgaggtcaggaggttgagaccagcccgaccaacatggtgaaaccccgtctctactaaaaatacaaaattagctagacgtggtggtgcattcctgtaatcccagctactcgggaggctgaggcaggagaatcacttaaacccaggagatggaggttgcagtgagccgagatcacaccatcgcattccagcctgggcaacaagagggaaattccgtctttaaaaaaaaaagttgtgtttttatacacttttcaagagctgttgcttctgttactattgtttctgctgcctattttctcttttcttccccaatttctcccttctttggaaggactggatgttggctaacatggtggctcatcaaacatgactgtttttttttcttttgagacagggtcttgctctgtcacccaggctggagtgcagtggtgcagtatctgctcattgcagcctcgacctcctgggctcaagggatcctctcacttcagcctcctgagaagctgggactatagtcgtgtgccaccaagcctggctaatttttgtattttttgtaggggtggggttttgccactttgcccagggtggtcttgaactcctgtggtctcaaactcctggactcaagccatctgctcgcctcagcctcccaaagtgctgggattacagggataagccactgtgcccagattcatttctgacttttctttttcttttttctttttttttttttttttgagacggagttttgttcttgtcgcccaggctggagtgcaatgacaggatctccactcactgcaacctctgcctcccaggttcaagcgattctcctgcctcagcctcccaagtagctaggattacaggcgcccgccaccacgcccagttaattttttttttttgtatttttatctgagacggggtttcaccatgttggccaggctggtcttgaactcatgacctcaggtgatctgcctgcctcggcctcccaaagtgctgggattataggcgtgagccaccgcgcccggcttgacttttctaactttctcgttgatgagtagatagttgtatcatcacagattaaatcttgaggttttcatctattcctggctatggtgagagctacccaccctgccaagctcaggaatgcattctttcaaatcattctggatgcgtagggtactaggaatttagtctgtatgattgcattttattttaatttaattagaactttgaccctcgaacttgctctcagggtgggatattctttagaaagcatgaatagcctatccttactgtataccatgagaaagttagtgatactaaccagttataattttataaaagaatatgatgatatatatagtcagccctctgtatccgtggattctgtgtctggattgaacaaaccatggatcaaaaatatttggggaaaaaaacaaaacaataaaaataatacaaattaaaaaatatagcacaacaaatttacatggcatttacattgtatcaggtattatgagtaatctagagataatttaaagtatataggaggatatgcatagattatatgcaaattccattttatatcagggacttgagcatatgagaattttgatattcacgcgaggggtcctggaaccagtccctcgcagatactgagggatagctatatgccttataaaatcccaggcatatttgtttatgaaaaggcaagctaggctgggcacagcggctcatgcctgtaatcccagcacctgggaaggctgatgctggtggattgcctgagtccaggagttcaagaccagcctgggcaacatagtgagacctcatctctataaaaaaataaaaaaaattagccaggcattctggcacagtagttccagccagttgggaggccaaaatggaaggatcacatgagcccaggaggtcgaggctgcagtaagctgtgaccgtaccactgtactccagcctgggcaacagagtgagactgtctaaaaaactggccggtatggtggcccacacctgtaatcccagcactttgggaggccgaggcgggtggatcacctgaggccaggagttcgagaccagcctggacagcatggtgaaatcccatctctactaaaaatacaaaaaattagccaggtgtggtggcaggcacctgtaatcccagccacttgggaggctgaggcaggagaattgcttgaacccaggagccagaggttgcagtgagccgagatcgctccattgcactccagcctggacaacaagagcgaaactccgtctcaaacacacacacacacacactcacacactcacacactcacccacaaaaaacccaccaaaacttctgggttggatctggtgaggtcacaattttggatttggttcccacgtggtccagttttgttattatgaagtaaatctctgtttcagaggccaccatatcacatttctcgagtctccttgtagacacctaacttgtccgtgatgatgtgaggtaataacaggagataatgattcagcaaagctttgtcccgccactgagaaattgctttgaaacagtggcccatccacagttgcaaagtgggggtgattcttcttcagggagcatagcgtagcagattttcccctgcgtcctctgtgtttgttcctcagtgtctggaaagtgcttaccctagagagtgagcttgggaccatttttattaaagctattattattattatttgagacaaagtctcactttgtcacccaggctggagtgtggtggtgcgatcacacctcactgcaacctccacctcctgcgtttaagtgattctccttgcctcggcctctcaagtagctgggactgcagatgggcaccaccacgcctagctaattaagaaaatttttttgtagagctgatgtctccccacaacccagggtggtcttgaactcctgggctcaagagaccctcccaccttggcctccctaagtgctgggattataggcgtgaaccaccgtgtctggccattaaaggtatcctcaaaactcattttatagtatttattttcttttgatgttcattgattttttttttttttgctaaagttgtcttgctttttaatgtagaccaatggagtgcattttacagacaacaaaacatatcctatatggtgggtagcaaattaaataggctttttactttttttctactctttgattctttacctattaaaatattgcagttttctcttcatttaaaaaacttatgaaattcgtgcttaatgttaaaccttgaaaacatagacaagataaagtaaacaaaggccatctaacatcccataatcctggttaatatttttgtgtattcatctctcctaaggatgtgtccattagcattttttccaggttgaattacagatacctttttcagagactgcatgctagtctctcatgattcccttatctgttatattgaagtcgtgtgtgatcgcacgggaaacttgcttttgttatttgccatcaccaaaggacccttctgaatgaagagcgagggcagctggctgttgggtgtgtggcgtgttgtcatcacttgaacacaggattattaaaggtgcgcaggattgttaaatgtgcctgctgtcggctgatgtcagatgatcccctgggaaggtttatttatttatttatttatttatttttaccctgcaggctccagttctgcttcagcagatctgggatggaggctgagactccccgtgatgcccaggcagctgttcatgagccccctttggagtaccattgagccaaggtcctctagcatggccgagtgctctctgctcttgcagtgaggcagtctctgcttttgttctgctcagggctgacctgttttggggggcttcctccactcttggggggcttcctccacttcctggctcttttccctcatccacgctgctcaagaccccatttcttccctgctgtctcatgcatacatccacgctcctcccaaacctctgttcctgtcactccagcaggctcctccatctccccaggccaccctcctaccaccaccactcccaccaccacatcagagtccttttttttccagttactacttgattgcccccctccccacttcacccctcagtttcctgtctggagccctcagattcctttctctccatggagggcagtgactcagaggcgcctacctcagaggcggcatcaatcaggtgtgtcctggccccaaactagctctccacttggggctccctgagtgttgaggccttggatttccttgcaggggaaggaaggaggggtgagaaagatccagaatcttcaaaggagccttctttgcccagtccaacatccactccacccagctgactggagaaataaatgctaggtttgactgaacaaataacagtaattaagatctgtttcctgaacagcctacccctttggcctgtttactttgcagcccaataacaattcattcagtcagcctggcattgaggtccattgtgtatgattttgttgccggagtgctagtcttcacaatctagggctgatagaagacttctgccttgtaattttaaaaagtagagggaacaccgctgccaatatgagcaagttacttgtttctatctctctctctttttttttttttatttttatttattgagacagagtcttgctctgtcgcccaggctggagtatggtggcgctgtctgggctcactgcaacctccgcctctgagttaaagcgattctcctgccttgctctcctgagtagctgggattacaggcatgtgccaccatacccagctagttttttgtatttttagtagaggcggggtttggccatgttggccaggctggtcttgaactcctgacctcaggtgatccacctgcctcggcctccaaagtgctgggattacaggcgtgagccaccgcgcctggcctgtgacttgcttctatctctgtactcccgtacttggttgtgtgtagccaataccctgaatgaaaaaaaacaaaaaggtaaaggttggcgggtggtgatgtaaggttattttcatttctgttgatgatagaagaaataagtataagcaccttcatttggccctggttccttttgcaaatgtattttaagaacataaacaggagtttctcaagctgggggcgaaggggtaattgcatgacagttctctgccagttggtgccatcgaggcagctggtgcttgaatgcaggcatcctcacaaaggctgtctagggctttgtgccagcttgccttggaatgaggacctgctccagaagtgggtggaggggtgctgataaaacccactgggcatctggcagtgcttgcttgaaaaggcaatgaacagcggctatttgtttgggggaaaggcacacacctattcgttccttccacttcaagctagaagtggaagaagaagatgaatttcaagggtgaaaagagggaagagctggaaagaaggtttcctgaagtttgagggatgatgaaggctaaagttaactgtgagaaaaagtgttttctcagctgtaggaaaacagtgcagctgttactccaagaaaaaagctgttaaaccaggactttcatggcactaccaggcatccagaacatggggtgggctagaggagtgagggcgaccctgtaggagggacatgcgtcttgagaggttagtgtgggcccatgcctccctttccccttcccctgatcttgcctctgagcactggtactatccaggtacagctgtggttttccaaaccagaggcctgttgtctgacattttgttttctaatttatgtatttatgtgaaaaatattagaaagacttgaaataatcatcttttattggacactgaatcctaaagaacaggattttatgggatctagggtaggtgaagcgtgcaagtttttccttgttcagagcccttgttgctagactaaccaccttgaaagagaaacatattgttactgggcagtggaatgggtcagaggtgttcttttgagtagtgagccctttctgtgatgtggtttgtggggagagcggccagtggttgaatctgcacgtggggtgatttagtcggggctgtcagcttctcagaagcgcaggaagggaggtagtcgggggtgggcattaccatagcacagcctgtagctgttcaagagcaccagacttttttttttttttttgagacagagtcttgctctgtcaccaggctggagtgcaatggcgtgatctcggctcactgcaacctccgactccctggttcaagtgattctcctgcctcagcctcccaagtagctgggattacaggcacgtgccaccatggagtttcactcttgttgcccaggctggagtgcaataatgcaatcttggctcactgcaacctctgcctcccgggttcaagtgattctcctacctcagcctctcatgtagctgggattacgggcatgtgccatcatgcctggctaattttgtatttttagtagagatggggtttcttcatattggtcaggctcgtctagaacttccgacctcaggtgatccgcccaccttggcctcccaaactgctgggattacaggcgtgagccactgcgcccagccaggaacaccggttttgtggccaccccagggttaatgcgacacatgctggcttttcgttttaactgtcatgagggaaacctttcaaaatgtattagactctgagacacttgaaactgccttcttcctaggatcagcagagcatttgtttgtttgtttgtttttgagatggagcagagcgttttttaaagctactaacgatgacttcctttagttgtctcaagtgtctgttagtatattgcacagtagatacagaagtgtggaacccagaggatgagttactagctccttccttttccagactgctgagttgtttgcactgatgtgttttttgatgctccactgatggttgtcactagatttgtccttgagccaaatcacctaacctttctgggcctcggttttcacatcaggaaaataggaggactggactagatcagggacttccagtgcaggttttgggatgtagccctgtttaggttgaattttctggatgctgagtttgattaaaaaatccactaaaatgtgagtttcctgagagcagggactatactaccaactcctagaaccagtacccagtcactagtaagcatttaataaatactgtatgaatatagaactgcatttttggtattatactgcatccatatgtgttacatattgtgcatagaatttcgtttggtggggagaagagctcactcgccgctaaactcttgaagcttctggtgcacttgagttctaaggtcctctgcactccagctctctgagagcagtgaaatgagctcctttctgtttccatccccgagcatacgggcatctagctggcactggggcctgtcaccagcctagaaagcactccgtggcttggcagggtttggggattgggctggcacatagcacctcttggaaagggcttggcaggtttctcccttgcagcataatctccatgacacaatgaggcaaattttgggtttagtgtttcactggctgccggttgataagctactatttataaagtagaacgagcagggtttctgcccaccttcttttttgctgagactatttaaaattaactattttataaattaaaaataaaacttttaaataaacttattttaattaaaaatttgtaaaataaaaatatcaaaataaaaaaattaaaattaaaaattaagaataaaaatgtaaacatcaaacttactttataaatgaaacgagtttttactgtattttattttatttgtttttttagagacagagtctcactctgttgcccaggctgaagtgcagtgatgcaatctcagctcaatgtaacctcaatcttctgggctcaatccatcctcctacctcagccttccaagtagccgggactacaggcttgtgtcaccatgcctggctaatttttgtattttttgtagagacagtgtctcactatgttacccaggctggtctcaaactcctggactcaagcgatctacccacctcggcctcccaaagtgctgggattacaggcaggagccactgtgcccagccctaaaactaattaaaaaaaaatatttaaaacccaatgggtacttttgttttctcccagtctcctccacttctccgttttgagtttcaaggtttcattttcttatacctttttcttaatagaacttacttaactcaccttttcagccctgttctgccacaggtatttgttgcctcagtgggtgccagtgaatgttcccacagctcttgttttttcctcagtggaaatgaaggtgtaaagacggctttagctttccaacaagttttctcacacacataagttgccagcatgctctcctgtgttcagactgaaggtggtgaaccccacagtctgactgtggagatggctcttgcttttcacccctaactcagtggctcttaactggggagccattgtctggagacatttctgatcatcacgccttgcaggggagagggggagttgtgactggcatctagcgggtagaggcagggaggggcgctgctgaacatcagcatccagtgtacaggtcagcccccgacaagaaagaattttctggcccccagtcaatagtgtcgagtgatagaaacgctgctctgaaggacctgcccctgaggaacgtttgttttctgttgagctgtcagaagggatgttgtttaccctcaacctcaaaccttatagatctcaccaacctgctaaaatgtatcaagtgtgatatgatatttttaattttaaggtagagagagggtcctgtgatggaatgattcaaataatcccactgctgtctgagaacagaggacttgataaacattcttctggtgctgaaagtagccctaacctcctgagaaagagactccaaaaaaggggaacatctttgtcccagactccattgtaaccccaaagctgactgatggctttgtatgcgttcatagcctcttcttgcccatttcagacttggttctggtggctggagatactaagttgacccttgactgtttgtttcatggaaatgttcaacgtggaaaataacaccgctctagtatgttgaaacttgtttgagaaaccacttgccagaaactcatctctcacagtccccacaatactgctgccacagttatgggcatgatgatgaaagccttggcgctttagaggattctctgaactcaaaataaaatttaagaaacccagataaaggaactataagagcatatttctagtctaggcagatatatagcttctgtttaacttcttgaacttttaggtagccgtattaatctgttcttgcattactataaagaaatacctgagactaggtaatttataaagaaaagacctttaaatggctcaccattctgcaagctgtacaggaagcatagcaggttctgcttttggggaggcctcaggaagcttccaatcatggcggaagacaagggaggagcaggtgtcttacatggcaggagcaggagcaagagagagagagagtgggagatatcccacacttcagatgaccagatctcatgagaacacactccctgttgtgagaacagtaccaagtggatggtggtaaaccattcatcagaaatcttcccccatgatgcagtcatctgccaccaggccccatctccaacattagggattacaattcaacatgagctttgggtggggacacaaatcctagccatatcgatagctgtttaatttttttattttatttttaattgcttcaaattctaccaagtattggtttatttacatcagttaaactctataaagttttacaaggcttaaggaattttttttttcttgcggggtaaaaaatgcatacataaaatttaccatcttaactactgttttgagatggagtttcagtctcgttgcccaggctggagtgcaatggcatgatcttggctcactgcaacctctgcctcctgggtttaagcaattctcctgcctcagcctcccaagtagctgggattacaggcacatgccaccacacctggctaatttttgtatttttagtagagacagagtttcaccatgttggtcagtctggtctccaactcatagcctcaagtgatccgcctgccttggcctcccaaagtgctgggattacaggcatgagccactgctcctgacccaactattttcaagtgtatagtacaggaggtgtttttttgttcgttttttttttgtttttttaatgcctcaattatggtgatagttcactctggctgttttcttccaatcacattgaagtaggtttgatttactcattgtctgatgcatttaacaaatatttgagggcttaccacctatgaggtggaacaggaatgttttgttttcttccaaaatagaaacctgtaatgtttttctaattataagatgtatgcttgttgcagagagttcagaaaatacagaagagcatagtcactcataattctacaactctgtttactactgttgatgtactgatatatccttctagtttgttttttgttgttgttagtgctgatctatgtcttgttatatttttacccaaaatgctatcatactctacactattaatattaactattttcagtttatacagtgtggacgtctttccatggccataaatttttctgtataacctatataatcatttcagtgggtgtattatattctacaacatgaaccttccgtaatttaactgatcttaaatctaaatctttttattggacatctaggtttcttctcttaaaccacatgtattagatgtgtaatagatgtcatgtagatagtcatcttatgtatatctttgttttcttgcttagagagtgtagaatcaaggtctcttgtttactgcggtattcccaggaattgacaaagcacatagcaggtgtagagtatagtatatattagtgagtgaatgaatggcctggttatttccatagaattaggaaatagggcttttaatatggggtaggatttggtgaggcagggagcttggtgattgcggtggttgagctgcttggggcaagacactagaagaagccatccatgttcactgaggccagagtttgcatgggagacaggaaggggcacagaaagggaagtgacctcttcagatacttgctgaatgcttactgtacacacaggggcagggaagaaaaattgcttcctttttccagtgtagcctgtctccctcctgtaggaaaccgaggtttgaagccagtttcaggccagtgttacctgtcttgttcatgcgcttatgccagcagtaagtggagaagaatggcaaagagcctaccacatttaaattaagtctagtacttgcgggctctgtgaccttaagctgctgtttaacctctctgagccttggtctcgtctctgtaaaatagggatgattgtaacaggtaataataattgttgtgccttgcagaaagtaagagattaataagtgttaactattgctaactaatattatgatggattcagtaagctttagctttcttttttctttctttctttttttttttttttgagatgcagtcttgccctgttgcccaggctggagtacagtggcgcaatctctgctcactgcaacctccgcctcctgggttcaagcgattctcctgcctcagcctcctgagtagctgggattacaagcacccaccaccacatccagctaattttttgtatttttagtagagacagggtttcaccatgttgtccaggctggtctcaaactcctgaccttgagtggtctacctgcctcagcctcccgaagtgctgggattacaggtgtgaaccactgtgcctggctgattcagtaagctttcatgggttgccatgtattcttttgtatgggggaaagccactgtaagccccagataaaccacatgtgtatgtgttgagttttctagaatacaaccatttgtgagttaggaactacctgcagttacactgtttgttcagtaaaacactcctttattgagcagaggaatttttgtgctcgttcttctagcttttaagttgcaccatgccattgcatagctatcaataaaggacagtacctggcactgtggtgccaagagggagggtttaccaacaccccccccccaccccaccactgcccttttgtagtgggaagaaaggtctgtctaagctcagtggaagctatttctgagcttgagatgggaagattaagccacacaatgttggttgttgggtccagaatttcaatgaatgttgctctccaaagtagagaagtgttcatttcttctgcagaccacagttgactcaaaggtaaccctaaagcttcaaaagagaaggaagggaaggaggccctcacacggcatgggcagtattatgtattactgaaaggtgtggaactctgtagttaaaagatgcagtgttgtttacttgaataaaaaactttgaacccagttttatgtttttaatggatgtcttctattaccttggtactataacctcccagcatgctcaggaacacctgagttctaacagcttggtcagcttcagtatttgaggaacttccccactgtgccccatcccactgccgtttattaaggaacagtattataatttttgtagctcacagaaaacttgatgtctttccttagctttggtaggtctcctgtatttccagaattaggaaaagggactgaatgaagggtggtgtcacacttccttttacggtttggacttagtttagacacatgaaagccaacttggctgtccagccccgttgaggagcaagtccttcagaatagttggtttccatatggccgaggggttcatactccccaaaactcaagcactgaagctaaaaactgtgacccacatttgggatcattcttgtgacagaactgttctaagcacttatttgcttaggatacttctttcattcctaagtggaatgaaggtaacagaacatatgtgctgcctgggccattgtcgtgaatatgagtgatcacactgccgtgtgtgagctgttaccatgcagaacgtagaccatgcagcaatagagtgatgcttacatgacctgtgtgtaagctaaagaaaaatcaggctttcacatcaacttagtttattcagaagtcttgctgaagcttgcaacctgttagtcttttcagagagtttctgttagactgctccaaggcagagtttcagcccgcagtttatagacaggtgatggcggctcttccagtgctcagaagttacaacagatgtgctcgaagttagattagagcaagatctcatcaaggtttgggcacaggagttcatgtggttatagatgatagaggcatagtcattaatcctgtcagacatgtacagaaagaggcaagggttagggtcattgaacttacctgattcaggcaagagactcgggaacctgtgctgtgtgctgctgatcatcttcagggcattcttctggagggctgcactcggtcagagtcaggggctttgtggaatcctgctggtaagggattttgtaaaattctgcaggcagcagaaaagcaaacgtggcttcttacatttgccattttgtctcacgtgtgcttgaagagcttaccgctgctccactttttagttctggcttctccttttggttgcttttctctcctccttgctctggggttaactcatcatgcttgcctgttgcagtttgtttttcaacatctaagaagttatggatgctaaggatatccagttacctcttgcagggttgacaggagtgtggtgtgatgccaccatgctctctttccatgcctgtggcagatggtactcagtgatcattgcactttccctgctgagacattcagccttaagaatcctcctcagcacagagtttcaggcagccgctgcccatccgttggatgtgagatgaaacctgttgatctaccacccgtcatctacctgggcttcttcgacttacaagtgatgacaactaagacccagaagggcaggtcacttcgctagagttgagtccaggttctctggttctccccagcagtttgtcctcttggttgctgtggcttaagaacctggtagtcaggcctttggaactgtgaaagtaagacgtgagagagggagacagagacccttttatgattaaggtacatgtgttgtgtgtgtgtgcatgccgattttgtaatatgtttggccttcttgttgccagctggaaattctaggtaatgaaggtattgtgctttttaatttaacagaagtagtacttggaagttactaccagccctagctcatgtttctgtgagcatttcctcacacacctagatcaatccttggaaggaccatctgtgcccaaggctggtgcggaggacagagagggagacatatttattttttgtagaatgtgtgtgtgttgcggggctggtccttcattggagaagaaaaataacagtaagtgggaggcccagcttcaggtaagataagcaagagtcagcttatcctttcattttgattctttgccccggcaaggacaaagcacctcctatttagaaaagcctttgccattcctgcggttggagggaggatgtgccaggctcttcgaaagattttcctttgcagtatgtttgcgggaggggaagcttcttcagaagggaaaagcccaacatacagcaataccacatttgcaaatgcttttatatcactatcgttcaacttagttgcttttattttatttcttttttgagataggatctctgtggcctagaccagagtgcaatggtgcaatctctgctcactgcagcctcgacccgtggtcccagctatttgggaggcaatcctcctgcctcagcctcccaagtagctgggaccaccggcatgcaccaccatgcctggctaatttttgtatgttttgtagagatggggttttgccatgttaccccggctgggctgaaaatcctgagctcaaatgatccgcctacccagtgctgggtgcctcccaaagtgctgggattacaggcatgagccaccacgcgccgtttacttttctcaagtagtcagttttcttcattttttaactgtaagagtaatgcatgcacatggtaaaaacccaaccaggagagcagaacaataagtatcatagatgtcccctgttcttccccacatctaggcctgttcctcgggtagtcagtgttagtggtcttgtatctacacatatgtgtatgtacatagatatgaaatagcagggcgtactgcctgtgttagttggctagggccaccataacaaagtcacactgactgggtggcttacccaacagaaattcagcttctcacttgtgaaggccagaagtccaagagcaaggtgtgtgcagggtcactttcttctgaggcctctctccttggcttgtacatggccaccgtgttgttgtgctgtccctgtgtgtgtgtcctcctcttcttagaagcagtcctgttggattagggaccaccccagtggtcgtatttaacttttaaatacctttttcgttgagacagagtctggctctgtcacccaggctggagtgcagtggcgcgatctcggctcactgcaacctctgccccccgggttcaagcgattctcgtgcctcagactcctcagaagctgggactgcaggcatgtgccaccatgcttggctaatttttgtatttttagtagagacggggtgttgccatgttggccaggttggccaggctggcctcgaactcctggcctcaagcaatctactcgctttgggagttgggattacatgcgtgatccaccgcgcctggtctaaccttaattacctttttaaaggccctatctgcaaatacagtcactttctgaggtactagggtttagtacttcaacatatgaattttgggggacacaatttagcccaacacacctgacgtattaacaaatatttcattgtataggtcgtaattcattttactagtccctgggtagctggaaaataaggctgtttctagtgtttgttatgaacagcctcatacctaaatctctgtgtctttttggaaatgtatctgtgagaggagtttctggaaggattgcaagcattgccctctgaagatgttgttggactcccttttgcgtgtgtgaatgttacttccttggaggaggagagtatgcagtatctacaaattaacacccttagtattctctgtgattcagtgcttgcgtgggaaattgagtatagcatgcaattgtgaacttgttcccatggaggagattgccagccactgtgcgtgaggagtgttgccactgtgacttcaccatacattattcagccaacatccatttactgagtcgtttgggggggcaggcactgttttgttcatttatttatttatatttttaaaaaataggcttaggtttttttttttttagagcagttttaggttcacagcacaattaagaggaagatacagagagttcccatatacctcccctccccacttgcacggcctcccccattatcagctcctcccaccagactggtacatttgttagaatcgatgaacctaccttgacacatcactaccacctaaagtccatggtttacattagcattccctcttggcgttgtatattctatatttatttgttttttatatgctgtaactttttcagtaaaagctttatgccctcttggagccaggggtaacgaaaccctggcacttctctccaagcttgtgaaagcaccagtagttccagccaggaattgatttttccagttttgaaagtgagtgacatgctcagtgtcttaaccctgtaggtggcaggggctggatgtgaacccattttattcaaaggtatgctcctccagaaacacgtgttcagtcagcagggctgtgagatttccctagatgctaacataaatgtttcttttacggatgctgttttgaatttccacctggtatatatatcaatgtgtagcttaagataatgtgctcgaaccttaattattagcatagtttactttgataaatcacttttgggctagtaagaaaggctagtccattctaatatttggaatgtgtgtgtataggtacacatacatatagacacatatatatgtacatatgtatatttgtaataccatagcactgtatagagtaagagtgaaaatgaaatttggaaaatcagatccatacaatggcatatgactttaatgacagaatagggttaaaccaatagggctttctttttacattttccacaatcatgtcccttctgttgctatttgtctgcctttagatgatcagttccaattaggctcacagtgatgtttgtatctgtttatttttccctctgtggagataatagtaagtttaaatgttgattcagctgtgggaatgttttattgtgggaggcattaactgtttccaaaatacttattttcccaaatagaataagtattttgttgatcacatttgaacttgaaatacagtgagaggttgctgggcaccatggcttacacctgtaatcccagcactttatgggaggccgagacggcggattacaaggtcaggagattgagaccatcctggctaacacagtgaaaccccatttctactaaaaatacaaaaaattagccaggcgtggtggcgggcgcctgtagtcccagctactcgggaggctgaggcaggagaatggtgtgaacccaggaggcggagcttgcagtgagccaagatcgtgccactgcactccagcctgggcgactgagtgagactccgtctaaaaaatatatatatatatatagtgagaagttatctaagaccacagggtaacagagagttagcaaccagccaggcatggtatcatggtgtcctgtgcttgtagtcccagctaaggctgaggcaggagcattacttgagcccaggagtttgaggccagtctgtgtaacacaatgaaactctgtctcttaaaaaaaaaaaaaaaaaaagcaatcagtgaaggaggcagttaggaaagggttcaggaggcaggacccagagaaaagccagctaaagcagtggggaggggacagttgtatgtgtatgtgtttaaaattggggcatgtgagtggaaagaggtcagtaaaatcagagattgagaacatcagtgaaggaattgtaaaggaaagtggcccataaaacacccacacatgcagtaatgttaggataccacttgtgtattctcttatctcagcccgagtagaatgtcttcttttacaaagcagtggcttagttttgtgagtcaagaagaatctggaggaagctggcttggaaaatcggacgtaagatggagagagttggttaggaaaaatttgtagtgatgaaacagtagagaatgacacagggctcaaacaatgacagtctcatgaagtagatgagataactagggaaatgactgtgattccaagatctgtcataccattatggtatgttgtcttacccatatacctgtgatcgtagctcattgtaagtgatgtttatggtgtagcattctaattgatgcttgttttgaagccttgcagagtctcaaacttccttccaaatcattatcaaaagattgaattgttgggctttaggtttatatagagtatagtgttaatacatacagattttattgtaatctgcagtttatggtaatttcttgtagcattgccctgttggcttaacagggactcctttctggtgccagttgtgtctgattaggttatccaagacaccatgtagtacttctgccacccccactttataaacgagaagtcttgaggttttttttttttttttttttgtgcaccaccacacccggctaatattttgttttttgttttgttttgttttgttttgttttgtatttagtagagacgaggtttcaccatgttggccaggatggtcatggtcttgatctcctgacctcacgatccgcctgccttggcctcctaaagtgctgggattacaggtgtgagccaccgtgcctggccaagtcttgagtttttaaaggataaataacttgcttgtagttcacagctagtaggtggcaaagccaggccacaaacccagccaagctttgagcctgagcttttaatcaccatcctctattaccttatggtttattaaagatcccaaagaaaagatgtgtatgctgttagtggtatagcaggagctctgtgctcctctgggcccacgtcctactcattaacccaaaaagcttaccatttgggacatgaaactctggtagaaatgcagtgtaaaaggcacccatttcttttgagcttcaagttacatactctcattatttcctacaagggtgtatggctgcaggcctttcccatcccagcaccctgggtgcttgtacattcatccttaggctcatggattttgacaggttccttttgaaaccgtctagggttgatggtcatgttgtccgaggtgttatccaagtccgttgtctcacgaccaagaaaagtaaggattaatatgaacacaagggtgaagttggagtgaacgaagaaagctctgtgcaatggaaaggaggacctgagtgagtcgctgtttttacagttgagtctgaaagcttttatgagaaactcccctcatctctgtagctgtttgcctaagttcccttatctgtgcagctgtctgtgtaactctccttatcagtgcagacacgggcatgtgttgggtaaacacaaagtgcagctcctcatttgtgtaactgtgttttaggtaagcctcccccagcacctccccactccctgtgcaagttcccacggagcccaccgtgtatgtgcctgagaaggagaggaaacttttccctgggagcctgctaatcacacaaagaacaaaaggcttctatgctgggccctgctttcttatcagtgcagctgcagttttgtttttccccaggcaactcttatttgtatgtgtagctgtgatttttcagtctgtttctctgaggactagccttaactgtctgcctaactgatttttccttttcttctccctcactttcttgggcccaactttttgtttttcatgttcttcccactttgtttactagttcttggcttcttctcttgctcttagctgattgtagaaatctttttgtctgagagtcacgattataatacttcagatgaactgtgccttttctgtgtaataattgggcatctcccaaaccattgatggttgtcattaaagatagcaccagaacaattccgatgaaagctttgttcacacaccgaactgttcctgcatgtcctatggtcaaggtacctgggaagaatgttcatcttgtagcttggaaggtcgacctacagaagacctgggtgaatacgttggtaaagtggtgtgactcagtacaggacaccaactgggcatcccacaatttaattcaattctgacactaactacctagagttcgcacagacctcacaggttaagggctgggttccacaagacttttctcatttcagatgccaattgcaaatctaggccttccatacttctgactgaccagctatgaatcaggggttcccagcatcccctctttaggttcaataatgggctagaatggatcacagaactcaccaaaactctttactggcgattaccagtttattataaaggagacaaatgaacagccagatgaagaggtacacagggcactgtccggaagggtcccgagcgccagagcatcgttcccttggagtttgggtgcaccaccctccaggcacatggatgcgttcaccaaactggaagctctgaatcccattgattagggtttttatggaggcactattatgtacatgcggctgattaaatcatgggctattggtaattagctcagtcttcagtccctgcccaggtgtgtgctcctgaaagttccgaccctctaaaccacatggttggttccactgatagccagccttccatcctgaagctatctagggacccaggaagagttgcctcattagtacaagctctggtatgactgaaaagagcattagtaacgaaatactctcctgttaacctctgtcactcaggaaattccagaagttttagaagcccttgcaccagaccaaatttttgtatatatatatgtagagtaatggcaaaaaccacaattacttttgcaccaacctaatatgattgttttcttttttcctggtcatgtttttcatggagatagcctcccaagtagctgggactacaggtttgtgccaccatgcctggctaattaaagaaaaaattttttgtaagagatggggtcttgctgtgttgcccaggctgatctcaaactcctgggttcaagcaatcttcttaccttgatctcccacagctctgggattaaaggtgtgaatcactgcactgggccttattaaaaatatatatatgtgtgtgtgtgtgtatatgtgcatgtgtgtatgtatatatgtatatataaaatatacattagatatagactgtctcaatatatataaatatatatacacatatatatatatatgtgtatatatatttatttagagacaggttcttgctgtgttgaccaggctaaacttgaactctggtctcaagcgatcctagtctcaagtgatcctccagccccccgagtagcagggactccagatgtgtaccacagtgcctggccatgtttcttattctatcacagtatcatgctctaagcagatgccttctgttccttttctagctggcctgctgctgtgggtctgcaggctgctctctctgctgtgattgctgccccaggattcggcagtccctcagcacccgcttcatgtacgccctctacttcattctggtcgtcgtcctctgctgcatcatgatgtcaacaaccgtggctcacaagatgaaagagcacgtaagtttgtccgtgttcagctcgtcctatttccgatgtttgatgagggtgtgtgggaaaaacatgatttagaagatggggtccatgtacccccatgtgttttggggtatacctggtttccttgaaccttcctgaagcctgctctatgctttccaggatccaatgccttctggctaaacaggaaaaccaatcaacagcttgatctttagtagtagtgtagattctatctgatgcttttggtggagaattcttgttttaatttttaaattttaaaacatttgtgtagattaatggggtacaagtgcaattttgctatgttgatatattaccttgtggtgaagtcagggccttcggtgcatccatcccgggaataacacacgttgtacccaccaggcaacctctcatcatccacccccttcccagccccacagcccctgagtctccattgtctatcattgtccatcattggacacatcatggacacatcattgtccatcacaatcgtctgtttatgtcagacgattgtgtattttatcttagcattgtttatagctgttcctgatgaaatatactatcttttcttgtacccttctgtccttttcccttgtcataggatggctgccaggatttctttcttcttttttttcgagacagagttttgctcttgttacccaggctagagtgcaatggcatgatctcggctcactgcaacctccacctcccaggttcaagcgattcttctgcctcagcctccctagtagctgggattacaggtgccccccaccacggccagctaatttttgtatttttagtagaggcagggtttcaccatgttggccaggctggtcttgaactcctgacctcaagtgatctacccgccttggcctcccaaaagtgctgggattacaggcgtgagccactgtgcctggccgcctgccaggatttcaaatagcagctgaaacacttaatttggcctacataggaagtataataaagctgatattctcacaaataatggagaatgggctatggggcatttcccacctttctggacaggttacttgtagggtgagtggtgtcttcatgggtgaggggtggatttttggccgttctttggtcagcgtatacagaagtaggcctggtgtgtgatgctgatggagatacatgtgggacctctttttcttgaatttccttttttcccccatagtagtcctcctggatcacaggggactgtggtggggattttgagagagcccaagaaataacactttgtctcctaggttctaagcaaattgacaaaaaagactaagatgtcagcaggttgccaaacatcacctttattcctcataaaactgatgtgaggctctgtgggctcatatcttcagggaagcaggcttttactgaacccccaaatgactcagactcacccagcagggcaccatcagtgcccgggaagggcagacttctttgcaagggcgcagtttgccaggaagagagagcagcaggcgtgttcccttggggcagctcttatcctagagatagagggagaagaaagccttgctatccaaatgccatttccccttacaaaccgaccactccgtactgcatcttcccagctgaacaagtgaggaggtggagggaagtccggagcaggctctgatggagctgcccacagtagggatgacattgcccggggcaacacctgagcaaacgtttgccccaacctgtgctgaaactagggctattttattttttttattgattgatgatttttttgtgggggggtggtggatggagtcttgctctgttgcccaggctggagtgcaatggcgcgatctcagcccactgcagcctccgcctcccaggttcaagcaattctcccacctcagcctcccgagtggttgggattacaggcgcgtgccaccatgcctggctaaattttcgtatctttctttagtagagatagggtttcaccatgttggctgggctggtctggaactcctgacctcaagtgatctgcctgcctcagcctcccaaagtgctgggattacatgctgagccaccatgcctggcctgaaactagggctattttaaatacactcaagtatttcaaaacaaccattttcttaacagcactttgtatattcttattcattaaaataggccttctgaagctttctgttgcatagtgcttttataattctggttgtatggtcttggatatggtggatactgcagtgaaatttgggttcccctctgactgcttgaaacattggctgtttcctcagtaagacactgtagtgctagccgtggggtgttcacacttgcgagaaatggagcttataattcagaagagaagtgatgaagtcttttttttcttttcttttctttttttttttttgagatggagtcttgctctgtcgcccaggctggagtgcagtggtgcgatctcggctcactgcaagctctgcctcctgggttcacaccattctcctgcctcagcctcccgagtagctgggactacaggcgccggccaccacgcctggctaattttttttttttttttgtattttttagtagagacggggtttcaccatgttagccaggatggtctcgatctcctgacctcgtgatccgcctgcctcagcctcccaaagtgctgggattacaggcgtgagccactgtgcccagccaaagttataaagtcttctaaggcctaaaacaaggcagaaattacgagtctcgctctgttgcccaagctagagtgcagtggcacaatcatggctctctgcagccttgacctcccaggctcaatcgatcctcctgcctcagccttctgagtagttgggactacaggcgtgagccaccatgctggctagtttttctatctgaaagcgtagattttaactcttattctgagcgtccacttaatctcccatgtactacttgtgtttttttaagtaatacagtaaattacttaaatttactctttgtaaattcaacaagcttgaatttctaaatccattaaggtggcttgatgatccactgtggtactgtggtgggaactctgctgtgcactggttgtagtgtgatccctgctcttaataagttgctattctttaatagaattaagccctgcatccaaaaaacaaaatctattactaaacaaatagatagtatcccacagtggtgaatttattgagacgttagagggagagataatttgggagccattggtatgtgttttaggacgtgaatttcataatgataatattcacacctgattaccatccaagtaacctgccccatgaagcagttctagcaattccagtcagtatttatgctttctgactgttaacggatcatttgagaaacagaagatgttccactggtgttgctaggaaaggcttcgtgaaataagtgacttgtatgagtaataataactatttcaatagctaattattgagtgataccatgtgtcaggttttattctgagcactttccctgtattttcttacttcatcagcactgtactcacctgaacagtaggtactagcattacccctgccctacagatggggaaactgaaacatcgagccatttaagtacctcacccaaggtctccagctattaaatggtggggttaggatttgaatctggtctgaatatgttcttagctacgaggctgtgtgactagagaggagggagaggcaggtggagaaggaccaagaggtgaggcgaggtgaaatgaccacatcttgcaggaattgtagtgccaaggtgaagtgtttgaatgtggtctgtggcaagtgggaagccattacagattctagagcaggaggctatatcatggaaacagagggagatattttgggaggtgagcctagaggtagtggtggcagtgggcacagggtgacttacagtcagagaacagagagagggaggaagagagggaaggcaaccctgatgtccctcacagaggctcttgtaaatgtttctatgcctgtcccctgaatgtacctatttacaaatggtttggctgggtgtcctgcgtagggaatgagatccctgtgggtgaaaccaatccttttccagctttagggcctcacaagggagctggccatctggccacaaagtcagcttgtttcgtggcctacagaagagaggctgacctcatcctcagggggtgcttgcgggcgggtgttgaaaggtccccttgtagggacgcacactgggctcctgctggagtccttaccccctctttgttggccgtggaagtgcctgagactgtgactggaagaggagaaagaactgcatgcttgtaacggcccggatgggagtgtgtaagtgcctcctacccagcgttctgccagagtcgcgtgggtctttggtatgtgggttaggagcgcaagggcagctcccttgtcagttatttccagtttttgccttggttgcagaatgtggcctgtgtttaagtttgagtaagaggggactgcaagggatgctgggccagactttgtcctgcttcttttctttagggaaactcctctttcccaggagaactttggctcagagaaagcttgactgtgctggttgaataaggcatgattctgtcttctcttggagcatttccccatctcaaaacataagggctatttattttgcaggtcattcttgttattaactgtataatttaagcaggtacacactcatgagatttgatacctgggggattaaaaatccattttagaggccgggtgtggtggctcatgcctgtaatgtcagcactttgggaggctgaggcgggcggatcacaaggtcaagagatccagaccatcctaaccaacatggtgaaaccccatctctactaaaaatacaaaaattagctgggtgtggtggcgtgcacctgtagtcccagctactcaggaggttgaggcaggagaatcgcttgaatccaggaggtggaggctgcagtgagccgagatcccggcactgcactccagcctggcgacagagtgacactctgtctcaaaaagaaagtccattttagaatgtagaatgcaaagggaacaaaagtgggcaagaaagtaaagcctcccaacccaaacgctaagtcaaggtgtaacgtctgtgtttgaggaagattcagatttaggcaccctgggaagccacatgggtgtttggggagggaggagaaaggaaagtctttatttcctagggagtaggggccactaaaacctgtactgaagaaggaaggatgggtgacctgtgcagcccccactttctcccctgagagctcaatgtgccaggccaatgtaggaagagccatagatattcccagcctgaaacatgttagatctgtttccttcattccacattacactctccactccctccccatcttcccctcaagctccccagccctaggcagccactaatctattttgtctctgtggatttgcctattctagacatttcgtataaatggaatcatacaatatatagccctctgtgtctggtccgttctctctctctctctctcacagatggagtcttgctctgtctctccggctgaaacgcagtggcacgatcttctgcttcagcctcccgagtagctgggattacaggtgcctgccaccatgcccggctaatttttataattttagtagagacagggtttcaccatgttggccaggctggtctcgaactcctgacctcaggtgatttgcctgcctaggcctcccaaagtgctgggattacaggcgtgagccaccgcacctggcccacttagcatgtttttaaggttcacactcaggttgtagcatatgtacttcattcctttaagtggctagataaatattctgttgtatgaatataacattttattttacttttatttatttatttcttttgagatggagtttcactctgttacccaggctagagtgcagtggtgtgatctcggctcacagcaacccccgcctcccaggttcaagcgattctccttcctcggcctcctgagtagctgggattacaggcgcgcactaccaggcccggttaattttttatatttttggtagagacagggtttcaccatgttggctagactggcctcgaattcctgacctcaagtgatctgcccgccttggcctccaaaagtgttgcgactgtaaatatacctgtaacatattttatgtatccatttgtcagttgatggacatttggattgtttgtaccttttggctattataaattatgctcctgtgaacattcgtgtactgatttttgtatggacatatgttttcatttctcttgggtttatatctagaagcagaattgctggattgtgtagtaattttaagctcttgaggaaccgccatattattttccaaagttgctacatcattttccattcccaccagtaatgtgggatattcaggatgaagtcatgtattaaggttcacatttctccacaccctcaccaacacttaatggtacatcttttttttattttagtcgctatagtgtgtgtgaggtggtcatctcctctttgcctgtgcctctaacactgccctctgcccttcccgttcgcttgctttcccctggggcagcttgttcatttctggctttgatcatccccatatgtgcatctgcttgtaaaaacacccttcactcaggacagtgctgaggacactggtagattctttcttcctgcatccccgtttttctagatcttgtgcatacttttccccagacaggtcataaaagtctcaggcttccactctgcattccagtcagtcacggtgatttggccatgccaccctccctggtgttgcatattacacttaccttgtttgaacttgagtagttcccagatgttcccagctgccctcagacttctttctccagataacttagcccgttagttaggctgagctgaaggtgctgtttgctacatttctcccagatgataccctatttctaaattctggggtcaccacagtgtagtgactgtaggtgaatacagtggctactttacttaaaaacaacttggatttccaaaggctattcataagcacatcttttagtctgtttacagtgacatgttaaaatacttctgtggttcttggagttgacagagttctttgatccgttatgtttgaaactctgaaactggggagatgagctactttatttcctatttttaaactgaagaattaaaataaatatgaagccataatattaaatattccttgtgggaagcccttcttgtactggttccagggatccaaaaatgcctgaaacaaggccccttaaaggagcgagttaaagagatgagtggaaaaaggctgcagctcgtatgtatagcaagtgttctgccttgagaagagacagcaaatacgtgtggtgttaagtgttctacagagaaaacaatgatctttttaggatataatttatttttaaaatttgtataaatttatgggggtacaagtgtaattttgttacattgatatattgcttaggatataatttgaatacattgttagaattttttttttttttttgcgacagagtttcactcttgttgcccaggctggagtgcaatggcatgatcttggctcaccacaacctctgcctcccaggttcaagggattctcctgcctcagcctcccgagtagctgggattacaggcatgcaccatcacactcggctaattttgtatttttagtagagaaagggtttctcaatgttggtcaggctggtctcgaactcctgacctcaggtgatccacctgcctccgcctcccaaagtgctgggattacaggtgtgagccaccacacctggcccattgttaagaatttttaaaagcagaaaagtcctaagtggtcatcttaacaaacctgtcgtttgacaggtgaggagctgtggcccaggaagtgaagtggcttgtcagaactgagacaccaggtatatctgggattagaacccagggctgctggtcgcctggccagtgcatctcctgtttgtgcaactaggtttgcttgttggtcagatattcacagaagtcacagttaaatgccttttatcaagcatatccttcctccgctttctagactttcttctgggcccagtggtaagaagtattacttttggaaatagcgctgcctggggccctcagcagcgatcttagcttagttacatttcccatctgcctgcttcctgttgtgatgaccaaaagctgagctcaagggatgactgttattctgaagtagaaaacagaggtagccacaaaactagtatttatttattcagtggctttacatgtaaaatagaacttgttttcaggttgtgtttggtataaccatctttttaaaacaaacatcatcagtgaaaaatattccgctttgatccaaaatactgtgcagtttgtcccaatgtaaaatgacaggtcttcatgctgaagctggagagtctggctcttgattttcctttgatatttactggttgaatgttcagagcacactgtacctgagacctgcatcaggggctggcataggcacattgaagcctcaagtagaactctctccattctccgcttatatgcttttgtgtcagaacaagtgtcaaattaacaataacaagaaaatattgctgacccagttctttgattctggaatgcttttttaaaatccagctgagatggagtgcttttcaaaagttctctttctgcgtagcaactgagttcatggtactgttgtaccttatgtgtcaagttatcaaggaggaagtttttgagattaaaagtgggttgggaccatcgaacctcaagcccattgtagaactgagggaaaattctcaccatgaccttttagaattttcctctggggagctggctttgaggttttgcctcttaaatcctctgagttccctcccctccaagttaggatgactctggagacatatgtttccaaacggttttatcttttggtctaaatttcatccggagataacatgtgagagaaagcaaggagtccctgtaccctcctatgcctcagctgtcattgctgggccttatccttccccatacaagtggatgtcgggaagtagtggtgggaaatcgttttgtactggaggcagcaatttgaactaatggatatcctgctgagagtctttttttgagcctgaaccaaggacaaagaggtttgatcctggtccagtaataatgagcttgccaggaggcaggaaattggaaacaatacatactgtccttggtctgtgaggatccattacctgcacgtttgcgggagcaccaggtgtcagctggatctcttttaggattggtctggctatggacgagagagaatgataagatgtgagaatgaaagttttcctaacacgtttttttctgtagtcatctaaagcgtctgttaagcaactgtccacagacagggcctcggagtagcctgcagataaatagaacagacaaaagctttggaaatgagcattgtcagccatcataaacatggggctggagagaacagagaaatggcacaacgaagaatggaagaaaaagtagcctcagagcgatgggaacaggaaacaatgcatagatattgtgaatggctgaatcttgatacttactctgcatagaaatttaataggatgattctgtgacttgattaaactgtaatccgagctcattcttcaaaagtttaaaaaattgcctagctgtcattctttcagatgcaagtggcgagcactctgaaaggtgctggggatttcagagacactgagtaacacacagttattgtccccatagagctggccctcaggtaggggaaaagagagcagtttggcaagtgtgtctggaaggagcctgtgatgctagactgtgtatgtctgaaagctaaaaatatgtgaactccattagtgaatattggacagtggtgttggctcagatgtgactcggctgaccttcggagtcacgtggtaactcaggaatgctctctccccattctagagacagagctgaggtgcctgggaggtttataaaatggaatgaagtgtttttgcctcctcatcagggctgagcataatcataaggggttgggtattctggtggtgtggttttaaaatttcagcgagacagtctctgcagtcttcaaatagatctaaaattatctttcgacatgctggctttcatcagtgtggggtttatttttggttccatggggtgtgtttgtgtgacagatgtgaggacgttttctgttcgagctattgatggcttctgagccgcagagatgagcgctggaagctcatagacacattctctctccattccttcccaccccatctgaaaaactttctgtgggtggataaattaaggtactttattttctgctaaaaaaaaaaaaatgacatatgggagatacacagtttgattcacttaaggcccaagttccatttgaggacagccctgaggaagggaagagtctcatgggagaaggcaggagcggagggttgggacagctggaccgcagcccaaaggagctgctcttttggctcttgatttgtagagtaagttatcaccagttgtcacttgcttttgaaatgtgcatttgtacttaggcagttaacagttagccacaactcctcatctattcttcctagtagcgcaggggtggggcagacttttcttacaaagagccagctagtacacactggaggccctgtggtctctgtagcagctctcgcctttgtagtgcaaaagcagccaaaacaatatgccagccaatggcatggccagccaaccagtgtggctatgttccaataaaactaggaggctagctggatttgacccactggctgtcgttggctgactcctgtgttagaccctccatggtcttatatgcgttatgtgcagttattctcccatctctctcaaaagggaaacgtcagtggcctgaacattgtgctcagagtaccagagttcttgcttaagttgcaggtaactgactaggctgtatgaaccacatagtgggtagactaggtaagaataatgtggcaataaattagtatgacatgtttaatagtaattatgtctatatggcattttggaataaatggcaaattgtttacaagttaaaaaaaaaaaagtctttttttttttctttctttttttttttttagagacagggccttgccctgttgcccaggctggaatgtggtggcacgatcatggctcactgcaggcttaacctctggggctcaagtgattccctgcttcagcctgctgagtaaccgggaccatagatgtgcaccacgatgcctggctaatttttctttttttttttcttttttttttttttttgtagagatggagtctccctatgttgcccaggctggtctcaaactcctaggctcaaagcaacgatcctcctgcctcagccttccaaagtgctgggattataggtgtaagccactgtgcccagccagtcatctttttatatattctgtcaaaggacgaaattacaaatttagttggaaagttgaattggattttatttgtgattctagaatgtgaagtagaacgactgttccagttagctgagcagaggagggtgtctttataggcagaaaaggcttgaaaaaaagcagaaacagaacaaaaggttaaaacaggatttccttattaggcagactcacattgactagaatctttcagtggtttttttttttggtttttgtttttaaagaaaactggcccccaaattcagtggcacttagtacaagtggcttcattttggttcggtctggtctgctggggcctagtgcaggagtcaaaaacaatggcctctcctaaactttaacaatccaaaccaagcattttggtgatccaggaagaagtggggttggagaaaatgagggtctgggcaccctagttccccagctgctgggcaccatcattcaattccaggtctgatataagaaagatgctggggccggaaacttaaatgtctgccatgtactggttcccatcactagaactggggaacaggtaatggggctctcaaatcttgaggttataggtttggtgtagagtcctatcttttggggaacattaggtcctaatgtcctgcctaaggcaaacatcatgactagtccgaattaaccatgaaaatacttcaaatatccatcaagtagagcatagttttgtgcatacagcatttcactagtagaacgttagctctttttagcatgaacttttaaactgttttattcacagctcgtatccccctagtttagagcaatacctgcacatagtagttgggaatgagtgcgtggatgatcaaactctaggctgtaatacatgtgtatgtcatgtaacatatagtacggaatgaagattatacatgcaaactctaaattcactggatttttacaaattatatgctcatgtctgtaatcccagcactttggcagaccaagatgggaggatcacttgagccaagagttcgagaccagcctgggcaacatgacgaaaccccgtctctacaaaaaatacaaaaattagtcaggtgtcatggtgtgcacctgtagtcctagctgctccaggaggctgagatgggaggattgcttgagccagggaggtggaggttgcagtgagccgagattgtgccattgcactctagcctgggtgactgagtgagaccctgtctcaaaaaaaaaaaaaaaaaaaaagtacgggagacagttatgtaaatagttgaacttgcaaataatgtattaccactgcgttcaggtccacacatttaagaagaaagcaagctaattttggctgagtgaggtggctcccacctataatcccagcagtgtggggatgctgcagtgggaggatcttgtgaggccaggcaatttgagaccagcctgtgcaacatagttaaaaccctgtctctacaaaaagtaaaaaagtagcggatgtgttggcatgcacctctagtcccagcttctgggaaggctgaagtgggaggatggcttgcgtctaggagtttgaggctgcagtgagctatgattgtgccactgcactccagcctgagggacagagcaagaccccttctctattaaaagaaaagaaaaaaaaagaaactagcagatttgaggctcacttagactataagcatgtgttttctctaaatggttagaatagaaagacctgcatgtttcagcatttagtcctctctttatagaaatttcacatttctatgttcaagagatatctttccatcagccgtgttcacctcagggcagcacagtgtcttctgttagaccctgtattctgtgtggggccatagccgtattttctagccgaaacgaaagttcagacctccgtagctgtggttttaagttgtcttgagttagaaatagatttgtgtctttggctcagagggtcctattcactctcttcccggctttggttgtaggggcattgcttacaaaggccctcaggaatctggaagattgaccatgttgaccttgccggggcagcacaggagtaccctggctgagagatgggtgtgtcaccgcaggctctgcctctgcttgccggcacctccactcctcctctcttctgctctattacccctaattccagagtttccaaaacccttcttatggagagtttggcagtatccgttcaaattttaaatgtactaactttatgacttctgtcataaagctgactttagcttctgtccttctcaacactttacatgtgaacagagagatacacataataaggatcgatatcccacttgtacacttatgttatgaatagctgagacaaaaatcaagaaaaaaacgtaaatgccctatcagccaggataacaaactaaattagagtcaatcagattgtagaattctaaatttttatctatttttctgagacaggttttgctgtgttggctaggctgcagtgcagtggcgcgatcatggctcactgcagcctcaaccttctgggctgaagtgatcctcccacctcagtctcctaaactcttgggctcaagagatgctcctaccccagcctcctgagtaactgggactacaggcgtgcaccactatgcctggccaatttttttactttttgtagagacggggtctctcactgtgctgcccaggctggtcttgaactccggggctcaagtgatcctcctgccttggcctctcaaagtgctcagattacaggtgtgggccactgggcccagcctagaattctatgtagtatgtaagaagatgcaaatagatttatctgttaaacatacagcaacctccaagacataatgaatgtagaataatggcacagcaaagggtctagaaagatccactcacacctggggacagtggcacctctagggaagcaatcaagttagaattgaggcattgatgggcaaggacactgggttatttgtatttttattgtaatttacacattttggcagtaaaatatataattgttttgcttatataagtgcaaataaaattgagaataatcctttgcagttagattttttttttttttttttttttgagacggagtcttgctctgtcgcccaggctagagtgcagtggtgggatctcagcgcactgcaaaccccgcctcccgggttcaagcgattctcctgtctcagcctcccgagtagctgggattacaggtgcccgccatgcacctggctaatttttgtattttttagcagagacggggtttcaccatcttggccaggctggtctcgaactcctgacctcatgatccacctgcctcggcctcccaaagtgctaggattatgggcgtgagccaccgcacccagccttctgccttcagttttacctaattctctcaatggagattgaaatgagttgaatcctgttctgcatctgtggaggagcccttcttcccatagtaattaattagtcagtcttctgggagttgtctcctttggagcttattgtataacggtttgcttagagttgctttctggctgcttaatcctatctgtgactgtttgattctgacaaaatattcatggtggaggaggagctgtgaactcgcattctcagtctttgcatgctttttgagattaattttcattcatcttttggcttttaataatgatacaatgtagatttttctattaaaaatgctcagataacccaaagaaaagagaagccagtactggttgttgttattgtttattaaatagccccagatcccccaaagggcctcaaaggcaatcacttactgagaaatgagctttggttgccaagaggctgtgtaaggaaagagggaagctgattttagtgtttcccatttcatggctgttgtccactgaccaataacaggaagtcatcagtgtggtggaccctggaagtacttcatggagaaaaacaaactatcctggaaagtttgaagatgagtggaatatcagaaaagggagaggcagactgggagacattctaggttctgaaatgcattttcaagtgagggatattaaacagaacttgcaaatctagttcttctagtttttgtgaacctaatttatccctcatgtggagctgcccaaagctttctttgaaatttgatattaatataatgaaatgtaagaataattagctttgctaatattgcattttcttttttcttttttttgagatggagttttgctttgtcacccaagctggagtgcagtggcgtgatctcagctcactgcaacctcttcttcctgggttcaagctattctcctgcctcagcctcctgagtacttgggactacagacgtgtgccaccacgcctggctaatttttgtatttttaggtatttttggtagagatggaatttcaccatgttagccaggctggtctcgaactcctgacctcaggcagtccgcccgccttggcctccccaaatgctgggattacatacgtgagccaccgcgcctggcctaatattgcattttctaatctcaagtaacacgattacacaactacaactttcacctacttcctctccatttcttaagaagccactcccaaaacttatacatgttttctatgtttgtagcatctgggcccctggccaattagacctgtaggtcttcctgtagcttttttgttgtttatttgcctgggattgaagttgttttagggacatagctagcatctctcctgtgtaaacaaaattacgtgaattttcttctcccttgcatcttgttgagtttattacttgttttcatgttttggaaatgtttttccaaatttgtgagttcagaatgctttcttctggatggtggctaggtctctgaaggacaagtagtgagtgctattttttggacctcagttctaatactaaatgtaccaaggaaagattcaccttactgacaggtcgggcgcggtggctcacgcctgtaatcccaacacttggggatccttctaggagtcgacctgacaagcatgcagcttgcactgccgtttgttgcgtgccgtgccgccgnnnnnnnnnnnnnnnnnnnnnnnnnnnnnnnnnnnnnnnnnnnnnnnnnnnnnnnnnnnnnnnnnnnnnnnnnnnnnnnnnnnnnnnnnnnnnnnnnnnnnnnnnnnnnnnnnnnnnnnnnnnnnnnnnnnnnnnnnnnnnnnnnnnnnnnnnnnnnnnnnnnnnnnnnnnnnnnnnnnnnnnnnnnnnnnnnnnnnnnnnnnnnnnnnnnnnnnnnnnnnnnnnnnnnnnnnnnnnnnnnnnnnnnnnnnnnnnnnnnnnnnnnnnnnnnnnnnnnnnnnnnnnnnnnnnnnnnnnnnnnnnnnnnnnnnnnnnnnnnnnnnnnnnnnnnnnnnnnnnnnnnnnnnnnnnnnnnnnnnnnnnnnnnnnnnnnnnnnnnnnnnnnnnnnnnnnnnnnnnnnnnnnnnnnnnnnnnnnnnnnnnnnnnnnnnnnnnnnnnnnnnnnnnnnnnnnnnnnnnnnnnnnnnnnnnnnnnnnnnnnnnnnnnnnnnnnnnnnnnnnnnnnnnnnnnnnnnnnnnnnnnnnnnnnnnnnnnnnnnnnnnnnnnnnnnnnnnnnnnnnnnnnnnnnnnnnnnnnnnnnnnnnnnnnnnnnnnnnnnnnnnnnnnnnnnnnnnnnnnnnnnnnnnnnnnnnnnnnnnnnnnnnnnnnnnnnnnnnnnnnnnnnnnnnnnnnnnnnnnnnnnnnnnnnnnnnnnnnnnnnnnnnnnnnnnnnnnnnnnnnnnnnnnnnnnnnnnnnnnnnnnnnnnnnnnnnnnnnnnnnnnnnnnnnnnnnnnnnnnnnnnnnnnnnnnnnnnnnnnnnnnnnnnnnnnnnnnnnnnnnnnnnnnnnnnnnnnnnnnnnnnnnnnnnnnnnnnnnnnnnnnnnnnnnnnnnnnnnnnnnnnnnnnnnnnnnnnnnnnnnnnnnnnnnnnnnnnnnnnnnnnnnnnnnnnnnnnnnnnnnnnnnnnnnnnnnnnnnnnnnnnnnnnnnnnnnnnnnnnnnnnnnnnnnnnnnnnnnnnnnnnnnnnnnnnnnnnnnnnnnnnnnnnnnnnnnnnnnnnnnnnnnnnnnnnnnnnnnnnnnnnnnnnnnnnnnnnnnnnnnnnnnnnnnnnnnnnnnnnnnnnnnnnnnnnnnnnnnnnnnnnnnnnnnnnnnnnnnnnnnnnnnnnnnnnnnnnnnnnnnnnnnnnnnnnnnnnnnnnnnnnnnnnnnnnnnnnnnnnnnnnnnnnnnnnnnnnnnnnnnnnnnnnnnnnnnnnnnnnnnnnnnnnnnnnnnnnnnnnnnnnnnnnnnnnnnnnnnnnnnnnnnnnnnnnnnnnnnnnnnnnnnnnnnnnnnnnnnnnnnnnnnnnnnnnnnnnnnnnnnnnnnnnnnnnnnnnnnnnnnnnnnnnnnnnnnnnnnnnnnnnnnnnnnnnnnnnnnnnnnnnnnnnnnnnnnnnnnnnnnnnnnnnnnnnnnnnnnnnnnnnnnnnnnnnnnnnnnnnnnnnnnnnnnnnnnnnnnnnnnnnnnnnnnnnnnnnnnnnnnnnnnnnnnnnnnnnnnnnnnnnnnnnnnnnnnnnnnnnnnnnnnnnnnnnnnnnnnnnnnnnnnnnnnnnnnnnnnnnnnnnnnnnnnnnnnnnnnnnnnnnnnnnnnnnnnnnnnnnnnnnnnnnnnnnnnnnnnnnnnnnnnnnnnnnnnnnnnnnnnnnnnnnnnnnnnnnnnnnnnnnnnnnnnnnnnnnnnnnnnnnnnnnnnnnnnnnnnnnnnnnnnnnnnnnnnnnnnnnnnnnnnnnnnnnnnnnnnnnnnnnnnnnnnnnnnnnnnnnnnnnnnnnnnnnnnnnnnnnnnnnnnnnnnnnnnnnnnnnnnnnnnnnnnnnnnnnnnnnnnnnnnnnnnnnnnnnnnnnnnnnnnnnnnnnnnnnnnnnnnnnnnnnnnnnnnnnnnnnnnnnnnnnnnnnnnnnnnnnnnnnnnnnnnnnnnnnnnnnnnnnnnnnnnnnnnnnnnnnnnnnnnnnnnnnnnnnnnnnnnnnnnnnnnnnnnnnnnnnnnnnnnnnnnnnnnnnnnnnnnnnnnnnnnnnnnnnnnnnnnnnnnnnnnnnnnnnnnnnnnnnnnnnnnnnnnnnnnnnnnnnnnnnnnnnnnnnnnnnnnnnnnnnnnnnnnnnnnnnnnnnnnnnnnnnnnnnnnnnnnnnnnnnnnnnnnnnnnnnnnnnnnnnnnnnnnnnnnnnnnnnnnnnnnnnnnnnnnnnnnnnnnnnnnnnnnnnnnnnnnnnnnnnnnnnnnnnnnnnnnnnnnnnnnnnnnnnnnnnnnnnnnnnnnnnnnnnnnnnnnnnnnnnnnnnnnnnnnnnnnnnnnnnnnnnnnnnnnnnnnnnnnnnnnnnnnnnnnnnnnnnnnnnnnnnnnnnnnnnnnnnnnnnnnnnnnnnnnnnnnnnnnnnnnnnnnnnnnnnnnnnnnnnnnnnnnnnnnnnnnnnnnnnnnnnnnnnnnnnnnnnnnnnnnnnnnnnnnnnnnnnnnnnnnnnnnnnnnnnnnnnnnnnnnnnnnnnnnnnnnnnnnnnnnnnnnnnnnnnnnnnnnnnnnnnnnnnnnnnnnnnnnnnnnnnnnnnnnnnnnnnnnnnnnnnnnnnnnnnnnnnnnnnnnnnnnnnnnnnnnnnnnnnnnnnnnnnnnnnnnnnnnnnnnnnnnnnnnnnnnnnnnnnnnnnnnnnnnnnnnnnnnnnnnnnnnnnnnnnnnnnnnnnnnnnnnnnnnnnnnnnnnnnnnnnnnnnnnnnnnnnnnnnnnnnnnnnnnnnnnnnnnnnnnnnnnnnnnnnnnnnnnnnnnnnnnnnnnnnnnnnnnnnnnnnnnnnnnnnnnnnnnnnnnnnnnnnnnnnnnnnnnnnnnnnnnnnnnnnnnnnnnnnnnnnnnnnnnnnnnnnnnnnnnnnnnnnnnnnnnnnnnnnnnnnnnnnnnnnnnnnnnnnnnnnnnnnnnnnnnnnnnnnnnnnnnnnnnnnnnnnnnnnnnnnnnnnnnnnnnnnnnnnnnnnnnnnnnnnnnnnnnnnnnnnnnnnnnnnnnnnnnnnnnnnnnnnnnnnnnnnnnnnnnnnnnnnnnnnnnnnnnnnnnnnnnnnnnnnnnnnnnnnnnnnnnnnnnnnnnnnnnnnnnnnnnnnnnnnnnnnnnnnnnnnnnnnnnnnnnnnnnnnnnnnnnnnnnnnnnnnnnnnnnnnnnnnnnnnnnnnnnnnnnnnnnnnnnnnnnnnnnnnnnnnnnnnnnnnnnnnnnnnnnnnnnnnnnnnnnnnnnnnnnnnnnnnnnnnnnnnnnnnnnnnnnnnnnnnnnnnnnnnnnnnnnnnnnnnnnnnnnnnnnnnnnnnnnnnnnnnnnnnnnnnnnnnnnnnnnnnnnnnnnnnnnnnnnnnnnnnnnnnnnnnnnnnnnnnnnnnnnnnnnnnnnnnnnnnnnnnnnnnnnnnnnnnnnnnnnnnnnnnnnnnnnnnnnnnnnnnnnnnnnnnnnnnnnnnnnnnnncagaactttgggaggctgaagtgggcggatcatttgaggccaggagttcaagaccagcctggccaacatggtgaaaccccatctctactaaaaatacaaaaattagccaggcgtggtggcaggcgcctgtaatcccagctactctggaggctgaggcaggagaatcacttgaacctgggaggcagaggttgcagtgaggcgagattgcgccactgcactccagcctgggcaacagaggtctcaattaaaaaaaagcggagggggggggggcggtcagatgatagaagcttatggcatgttgagctacagagaggaataggggcttggggcctctgggagttgctggcaacacgtaatgggagagtgaggggaagaaatgtatggtgaataaacgtctgatacactttactaatgtagatttcctctacagatgtaaattttttgtataaaacagcagctttgcagagctactcctgtgtcttcagcttctcagaataacgagcttgaaatacgcaaagaagaatgttttagggtggcatatcttggtttttgtgagtgacgccaaggtcagaggtaaccaggtccacgaacatttgtgtctttccataatgttggacttaactgatgctatttcagttacaaaagccaccagctatgtggagttcccagggagccaattcttcttagtacttctcatccactcattagatctgcaggcacacaggttccagcctctgcaccagccagtcagtattgcaaaccgtacacaatcgtatactctgtcaatatataaatgttactgattaaacattgtgcaacaaacaaaataacatttaacattaagagaaagggaataggaaaagggttaatgaagtagtccagggagagcaataaagaaaaaaagaatttcctggtctgggctggttaatctggttggttgtgcaagaaacagtctttgatgtgggcagagccttcggggcagatgccaggtgcttgtcacgagttagaaccgtacctaccctttttatggccacagagtcctccagtgaggactgatagttgaagactgtgcttgtttatctacttatctggttggatgcagtctttatcaagcaaaacatcttgtctctgttgtgacaaaatggtgtaaaaaaaaagtcataaaaaatgtacagttttaggaatttgctgaaaacaaaatgttggctatttcctcatgaagtctttcacatgtcttcatgaaaatggagctggccaggtacagtggctgacacctgtaatcccagcactttgggaggctgaggcaggtggattgcttgagtctaggagttcgagaccagtttggtcaacatggtgaaacaccatctgtacacacacacacacacacacacaaaattagctgagcttggtggtgcatgcctgtagtcctagctactcaggaagctgaggtaggaggatggcttgagccctggaggcgacggttgcagtgagccaagattgcgccactgcactccagcctgggtacagagtgagaccctgtctcaaaaaggagtggggagaaaatggaactctttgtttgtttgtgtaaaggaaaataaaccctctcaggactgcccaaactctttatgccaaatggaaacttaagactggagagacagtcacgtgacactgctgctgtcccctcgcaccttgcccccctgcccagtagatagctgcgacttcccaaccttgtgtcaaagcgctatgcattagccacacccctggagaaggcagaaggcctcgtgcatcccggatgactgccctcaaattgctcataagtaaattctctgctggtccctaaacctttcaagatgtgtatcttcccataaaaaaggacatgtcagctgtaactttaggtctgcaatctaagtctagctccctgtccacggaattgcagtctgttacatttcacactgacaatgcccattacaagcttatcttcccaggtgcagaacaaagacaggacagcagtcatttctctgcctaccctgagactacataattaactcttcctttactccctttttgaatgtttatcatatctcttttatagcggagtttactgggcactagttaaaatctcaggagaatgttgcatttgcctcaccacctgcccccttttcctgcatgccttctcccctttaaagaaatgggtaaataccgagcaacctctttgggagcgccagccacagaggattctgtgatttgtgtgtttctcagcagcccctcaagctctggcttaattattccccattgagactcttgcctcagtctctcatttgggttgacatttgtttatggaaatcgtgatagccacagatattattgtttcttcagtatctttttctggagaagaaactgtaaattatcttctttatcacactttccttttaccttcagttttgtgctattttttctctgtgatactttatttttcttatgaataatagttataatgtgatttattttctgttcagaagagtgttcaactttgatgttgataagaagcaagtttttatgactgaccaaatccttattttatgacattactaggaatgtgctgcttgttctcattgtgtaagattttaattattctgataatgaaactgattatttcatgtggaagtcttctaatttggctagaataagctattgtcaacatttatcagaagattaagacccactaataaagagctccagtggatcaagaaaatacccaattaacagccaattcagagaaaaaaaacagatggccataaacttgagaaaagatgctgaatctcactagtaataaggaagatgtaccttaaaacaggatattgggtttttgcctttaaattagatgtccaagttgggaaatgtgcaatctcagatattactggtaggatgtaaattggtacagcctttgaaagtatgatttaactcatcttgaagtttaaaaatgtagatactggttgaatattcctaatccaaacatctgaaatgtgaaatactctaaaatttgaaacttttaaagtgccaacatgatactcaaaggcaatgctcactgaagcattctggatttttttggattagggaaccttagccagtaatatagtgtaaatattccaaattctgaaagacttctggtcccaagcattttggataagggacattcaacctgactacttgacctactaattnnnnnnnnnnnnnnnnnnnnnnnnnnnnnnnnnnnnnnnnnnnnnnnnnnnnnnnnnnnnnnnnnnnnnnnnnnnnnnnnnnnnnnnnnnnnnnnnnnnnnnnnnnnnnnnnnnnnnnnnnnnnnnnnnnnnnnnnnnnnnnnnnnnnnnnnnnnnnnnnnnnnnnnnnnnnnnnnnnnnnnnnnnnnnnnnnnnnnnnnnnnnnnnnnnnnnnnnnnnnnnnnnnnnnnnnnnnnnnnnnnnnnnnnnnnnnnnnnnnnnnnnnnnnnnnnnnnnnnnnnnnnnnnnnnnnnnnnnnnnnnnnnnnnnnnnnnnnnnnnnnnnnnnnnnnnnnnnnnnnnnnnnnnnnnnnnnnnnnnnnnnnnnnnnnnnnnnnnnnnnnnnnnnnnnnnnnnnnnnnnnnnnnnnnnnnnnnnnnnnnnnnnnnnnnnnnnnnnnnnnnnnnnnnnnnnnnnnnnnnnnnnnnnnnnnnnnnnnnnnnnnnnnnnnnnnnnnnnnnnnnnnnnnnnnnnnnnnnnnnnnnnnnnnnnnnnnnnnnnnnnnnnnnnnnnnnnnnnnnnnnnnnnnnnnnnnnnnnnnnnnnnnnnnnnnnnnnnnnnnnnnnnnnnnnnnnnnnnnnnnnnnnnnnnnnnnnnnnnnnnnnnnnnnnnnnnnnnnnnnnnnnnnnnnnnnnnnnnnnnnnnnnnnnnnnnnnnnnnnnnnnnnnnnnnnnnnnnnnnnnnnnnnnnnnnnnnnnnnnnnnnnnnnnnnnnnnnnnnnnnnnnnnnnnnnnnnnnnnnnnnnnnnnnnnnnnnnnnnnnnnnnnnnnnnnnnnnnnnnnnnnnnnnnnnnnnnnnnnnnnnnnnnnnnnnnnnnnnnnnnnnnnnnnnnnnnnnnnnnnnnnnnnnnnnnnnnnnnnnnnnnnnnnnnnnnnnnnnnnnnnnnnnnnnnnnnnnnnnnnnnnnnnnnnnnnnnnnnnnnnnnnnnnnnnnnnnnnnnnnnnnnnnnnnnnnnnnnnnnnnnnnnnnnnnnnnnnnnnnnnnnnnnnnnnnnnnnnnnnnnnnnnnnnnnnnnnnnnnnnnnnnnnnnnnnnnnnnnnnnnnnnnnnnnnnnnnnnnnnnnnnnnnnnnnnnnnnnnnnnnnnnnnnnnnnnnnnnnnnnnnnnnnnnnnnnnnnnnnnnnnnnnnnnnnnnnnnnnnnnnnnnnnnnnnnnnnnnnnnnnnnnnnnnnnnnnnnnnnnnnnnnnnnnnnnnnnnnnnnnnnnnnnnnnnnnnnnnnnnnnnnnnnnnnnnnnnnnnnnnnnnnnnnnnnnnnnnnnnnnnnnnnnnnnnnnnnnnnnnnnnnnnnnnnnnnnnnnnnnnnnnnnnnnnnnnnnnnnnnnnnnnnnnnnnnnnnnnnnnnnnnnnnnnnnnnnnnnnnnnnnnnnnnnnnnnnnnnnnnnnnnnnnnnnnnnnnnnnnnnnnnnnnnnnnnnnnnnnnnnnnnnnnnnnnnnnnnnnnnnnnnnnnnnnnnnnnnnnnnnnnnnnnnnnnnnnnnnnnnnnnnnnnnnnnnnnnnnnnnnnnnnnnnnnnnnnnnnnnnnnnnnnnnnnnnnnnnnnnnnnnnnnnnnnnnnnnnnnnnnnnnnnnnnnnnnnnnnnnnnnnnnnnnnnnnnnnnnnnnnnnnnnnnnnnnnnnnnnnnnnnnnnnnnnnnnnnnnnnnnnnnnnnnnnnnnnnnnnnnnnnnnnnnnnnnnnnnnnnnnnnnnnnnnnnnnnnnnnnnnnnnnnnnnnnnnnnnnnnnnnnnnnnnnnnnnnnnnnnnnnnnnnnnnnnnnnnnnnnnnnnnnnnnnnnnnnnnnnnnnnnnnnnnnnnnnnnnnnnnnnnnnnnnnnnnnnnnnnnnnnnnnnnnnnnnnnnnnnnnnnnnnnnnnnnnnnnnnnnnnnnnnnnnnnnnnnnnnnnnnnnnnnnnnnnnnnnnnnnnnnnnnnnnnnnnnnnnnnnnnnnnnnnnnnnnnnnnnnnnnnnnnnnnnnnnnnnnnnnnnnnnnnnnnnnnnnnnnnnnnnnnnnnnnnnnnnnnnnnnnnnnnnnnnnnnnnnnnnnnnnnnnnnnnnnnnnnnnnnnnnnnnnnnnnnnnnnnnnnnnnnnnnnnnnnnnnnnnnnnnnnnnnnnnnnnnnnnnnnnnnnnnnnnnnnnnnnnnnnnnnnnnnnnnnnnnnnnnnnnnnnnnnnnnnnnnnnnnnnnnnnnnnnnnnnnnnnnnnnnnnnnnnnnnnnnnnnnnnnnnnnnnnnnnnnnnnnnnnnnnnnnnnnnnnnnnnnnnnnnnnnnnnnnnnnnnnnnnnnnnnnnnnnnnnnnnnnnnnnnnnnnnnnnnnnnnnnnnnnnnnnnnnnnnnnnnnnnnnnnnnnnnnnnnnnnnnnnnnnnnnnnnnnnnnnnnnnnnnnnnnnnnnnnnnnnnnnnnnnnnnnnnnnnnnnnnnnnnnnnnnnnnnnnnnnnnnnnnnnnnnnnnnnnnnnnnnnnnnnnnnnnnnnnnnnnnnnnnnnnnnnnnnnnnnnnnnnnnnnnnnnnnnnnnnnnnnnnnnnnnnnnnnnnnnnnnnnnnnnnnnnnnnnnnnnnnnnnnnnnnnnnnnnnnnnnnnnnnnnnnnnnnnnnnnnnnnnnnnnnnnnnnnnnnnnnnnnnnnnnnnnnnnnnnnnnnnnnnnnnnnnnnnnnnnnnnnnnnnnnnnnnnnnnnnnnnnnnnnnnnnnnnnnnnnnnnnnnnnnnnnnnnnnnnnnnnnnnnnnnnnnnnnnnnnnnnnnnnnnnnnnnnnnnnnnnnnnnnnnnnnnnnnnnnnnnnnnnnnnnnnnnnnnnnnnnnnnnnnnnnnnnnnnnnnnnnnnnnnnnnnnnnnnnnnnnnnnnnnnnnnnnnnnnnnnnnnnnnnnnnnnnnnnnnnnnnnnnnnnnnnnnnnnnnnnnnnnnnnnnnnnnnnnnnnnnnnnnnnnnnnnnnnnnnnnnnnnnnnnnnnnnnnnnnnnnnnnnnnnnnnnnnnnnnnnnnnnnnnnnnnnnnnnnnnnnnnnnnnnnnnnnnnnnnnnnnnnnnnnnnnnnnnnnnnnnnnnnnnnnnnnnnnnnnnnnnnnnnnnnnnnnnnnnnnnnnnnnnnnnnnnnnnnnnnnnnnnnnnnnnnnnnnnnnnnnnnnnnnnnnnnnnnnnnnnnnnnnnnnnnnnnnnnnnnnnnnnnnnnnnnnnnnnnnnnnnnnnnnnnnnnnnnnnnnnnnnnnnnnnnnnnnnnnnnnnnnnnnnnnnnnnnnnnnnnnnnnnnnnnnnnnnnnnnnnnnnnnnnnnnnnnnnnnnnnnnnnnnnnnnnnnnnnnnnnnnnnnnnnnnnnnnnnnnnnnnnnnnnnnnnnnnnnnnnnnnnnnnnnnnnnnnnnnnnnnnnnnnnnnnnnnnnnnnnnnnnnnnnnnnnnnnnnnnnnnnnnnnnnnnnnnnnnnnnnnnnnnnnnnnnnnnnnnnnnnnnnnnnnnnnnnnnnnnnnnnnnnnnnnnnnnnnnnnnnnnnnnnnnnnnnnnnnnnnnnnnnnnnnnnnnnnnnnnnnnnnnnnnnnnnnnnnnnnnnnnnnnnnnnnnnnnnnnnnnnnnnnnnnnnnnnnnnnnnnnnnnnnnnnnnnnnnctaatttttgtatttttagtagagacggggtttcaccatattggccagtctggtctcaaactcctgaccttgtgatccgccccctcttggcctcccaaagtgctgggatttacaggtgtgagccactgcggccggccaagctcagtctttttttttttttttttttttttgagaccaagtctcgctctgtcacccaggctggagtgcagtggtgcaatctcagctcactgtgacctccacctcacaggttcaagtgattctcctgcctcagcctcctgagtagatgggattacaggcacccgccactatgcctggagtttttttttaagtagagtcagggtttcaccatgtaggccaggctggtttccgactcctgacctcaagtgatccccctgcctcagcctcccaaagtgctaggattgcaggcatgagccactgtgcccagccccagctcagtgatttttatagacaaactggaacccatgtgatgtgacttattcaaggttatagcgtctttgtggcagagccagaagtcgaaccgagtccttgtcccctgtctgaaccttgtttctttactggtcattgttgactttttacccaataaaatttgaacctttgattttcctggcaatatgtgtttgcttttaagttgtgggtcattatggattttatgaattagggcatctattagggtacctggcagatgtagtgtggaggataagcttggatatttcagggtcagactgcctgtgttcagatcccaactataccatttattgactgagatgttgtcaacctacatagattctcaatttttctcttctgtaaagtgagtgacatttataatagtaatacatatcttatatggttgtgtgacaaatatgttaggtacactgatcatctagtaaaaattagctgtggttattctcttttgagcaaaatacaacgaaaggttgcctcattgtgttcttcatggtcttttgcagcctggcgctatgtgggagccgtcggaggcttcctcttcattggcatccagctcctcctgctcgtggagtttgcacataagtggaacaagaactggtgtgtgcctttatggaaagcttcccattgactcacagaaactgcccagttttgaccaaggctgtactcaactgcattgctagggatttgcagttttgtttccctttatacctgcttttttgtacctcttcatttactcctctccttcattcacttctcactttttgaccccctgcccctactcccttgcttgggctctgagtcaaccagtggtgtgaattagccacactcaatcccctgctcgtacgggtctcgatctcctgacctcgtgatccgcccacctcggcctcccaaagtgctgggattacaggctcgagccaccgcacctggccttgctgtgtttttttaacagactcttgcttataagaatctagaaaatgtgctcattgctcttaatagaacaactaaagtaccttttcttccctttttcatttatctctttgtaaatatcttgagaaggagatgatcctaaaaacagtaggatagaaaggtcatgggcctggcaaccaggagatgcagatttcagtacccttttgttttctttttcttttattattattattattattattattattatttttgagatgggatcccactttgtcattcaggctggagtgcagttgtgtgatcatggctcactgcagcttcgatttcccaggcttcagtgattctcccacctcagccccctgagaagctgggactacaggcatgtggcaccacacttggctaatttctttttctgtttgcttggtagagatgggatttcgccacgtcgcccaggctgatcttgaattcctgggttaaagagatccttctgccttggcctcccaaagtactgggatgacattgtgttcggcttcagtgccccttttaatgcttgctctcactgtagagctcatcagtcggcccctctgacctccattttcacacttaaataatgtgtttggactaactggtgtgttctttttttttcctttctagctcaaattttgtggtttacagtgtcaattctctattagaattgaaacaaagggctttaggtgtcgagtgtaaagactttttttggatttttagtgggatgggagagcaccagagggccttaaaaagggaggaatataatctgttttaagtccagaaaggtgaaaaggtgtcaggggtgcaagtaaggaggtcagggggagtcaatccaggtgagggaggagtagtctggaactaagtggtagcaaggagctggatcctcctatgttccaaagccagctctgggtggaggtgggtgggggaggggagagcagcaagaagcttccagagtgaccacagttcttttgttcttttcttttcttttcttttcttttgagacagagtctcgttctgtcgcccaggctggagtgcagtggcacaatctcggctcactgcaagctccgcctcccgggttcgtgccattttcctgcctcagcctctcaagtagctgggactacagtcgcctgccaccatgcccggctaattttttgtattttttagtagagacggggtttcaccgtgttagccaggatggtctcgatctcctgacctggtgatccgcccacctcggcctcccaaagtgctgggattacaggcgtgagccactgcacccggcttcttttcttttcatttcatttcatttcattttcttccttccttccttccttccttccttccttccttccttccttccttccttctttccttcctgcctttcctcttcctttccttttccttttcctttcctctttctttgctttcctttctttcctttcctctttctttctttccctcttcccctaacaatgggaagttggagttgctgttttctgaggttgggataattgcacaatagcaggtttgggggatggaggaatgggggtgtcaatatcaggaagttagccttagcctggatgtgccaagtttgagataccagttagaccttcaagtgggtctccaattgttaaatgaacaaggggataatataagtgacattcaggggaaaggttagggttgaagatttaactttgggatggactgtaaacataaattaactgaaagaaagtccttcatattctaataacataaccaaaaagactagtgaatagaagcgttggtcgtctcccacgcacaaaccagtcagcagtgtttacctttttctgtataattcatgctgtctccccatcatccattattatttgctcttagatatttttttccttcttaaaatcccatttttctctcatttcctttgtatgccttttatgttagaataattccaaggtcattggagtgtctggcacagtttcaggaatatgacggtcattatcattttggcctttcctccctattttctttgtttctggttgcaggaactttttcatcattaaaacattttagctgggttgcttgaacactttccagttttgtgagggcataaagcaagttgctttttctgtgaggtttgggagaatgtggttacaaagagcaatttaatcataaggcagatgacaatgattcattcaattcattctccctgttctgtcctcttcatttagcatttatagatacttttttttgttctgaacaatttccctttttgtgtgagacagggtcttgctctgttgcccaggctagagtgcagtggcatgatctgggctcaccgcagcctctgcctctggtgtccaagcgattcagccactcaagtagctgggattacaggcatgcaccaccacgcccggataatttttgtatttttggtagagatggggtttcgccatgttggtcaggctggtctcgaattcctgacctcgtgatctgtccgccttggcctcccaaagtgctgggattacaggcatgagccaccatgccctaatttattttttaattgacatattgtaattgtacatatttatcgggttcattttgacgttttgatacatatatgttatatagtaatcaaatcaaggtagttggctattcattacctcatggatttatcatctttttctttctttcctttctttttttgtctttttttttaaagagacagggtctcactctgtcacccaggctggagtgccgtggcgcagtcatagctcactgcagccttgaactcctaggctcaagaaatcctcctgcctctgcctcccaagaagctggctaattagcatgtccagctaatttttttgtttgttttttgttttggtttggtttttggtttttgtagatggggtcttgctctgttggccaggctgtatcatttctttgtgttgagaatcttcaaaagcctctcctctagctgttttgtaatatacaataccttactgctagccatcatcaccctaccatacagttgatcaccagaatttattcctatctatttaactttttttaatgtcaaattttcctttactattccctgatactattttagataaagaagcagcacagttacaggtccttctcttcagtacagggaataaagagctaaggtcagccagtatggctcttagtaaaggtaattctctttcctccctaagaagatggcatcagagctgctggcaacactttgtttctgtttttaaaagtttatttattattattatcaaacatttagggccaggcacagtggctcatgcctgtaatcctagcactttgggaggcagaggtgggtggatcacgaggtcaggagttcaagaccagcctggccaagatggtgaaaccccgtctttactaaaaatacaaaattagcccggcatggtggtggatacctgtaatcccagctactaaggaggctgaggcagagaattacttgaacctgggaggcgggggttgcaatgagccaagatcacaccacagcactccagcctgggcgacagagcaagactctgtctcaaaaaaaaataaaataaaaaatttagacagggtcttactcttgcccaaactggagtgcagtagtacagtcatggctcatagcagccttcatccacccgagctcaggtgatcctcctacctcagtctcccaagcagctgggactacaagtttgcaccacaacatgctgctaatttttgtagagacaaggttttgccttgttgcccaggctggtcttgagctcctagcttcaagtgattcacctgcctcggcctctcaaagtgctgggattacaggtgtgagccacctctcctggcagcactttggagtagagactatggcgcttcggggctctgtgtttatggagaaaacttggggaagcccagtgaagagccacttttttcatcctgccaaaaactgacccacggtggttcatagtcagaatggagaagctagaataaagtctgtaggtagctaaaggaaataaagagtctcaggactgctcaaactcattacaccaaatggagagttaagcctggagacacagtcatgtgacactgctgtctccccccacctgcccatagatagctgtgacttcccaaccttgtgtcaaaggactacacattagctagatctctacagaaggcaaaaggccccatgcaacccggatggctgccctcaaattgctcataagtaaattctctgcttgtccctaaacctttcaagatgtgtatcttcccataaaaaaggacatgtcagctgtaactttaggtctgcgacctaagtctagctccctgtccatggaattgcagtctgttacatttcacactgacaatgtccattacaagcttatcttcccaggtgcagaacaaagacaggacagcagtcatttctctgcttaccctgagactacataattaactcttcctttactccctttttgaatgttgatcatatctcttgtatagcagggtttactgggcactagttaaaatctcaggggaatgtcacgtttgcctcaccacctgcccccttttcctgcgtgccttctcccctttaaagaaatgggtaaatactgagccttctgcaacctctttgggagcaccagccacagaagattctgtgacttgtgtgcttttaggtgcaccctcagacctctggctcagtacacctcggctgattgagactgttgcctcagtctctcatttgggttgacattattcattttaatgaatgaatacatttgtcgcagaaagtggaattctctcattgttgagagaaaattctcagcttgagtcaagaagtttccatatttaccagaaccttctagctttgatgagcataatcactgctaaaataatgtgtcttctgagcagctgggtaccagtgcctgtggcctgtagcattagttactgcctgagggatggtgactgttaccgcagaatggtgggcttcgttgacttgtcttctctcctctccctcttacccacttcccggagaaacaggacagcaggcacagccagtaacaagctgtggtacgcctccctggccctggtgacgctcatcatgtattccattgccactggaggcttggttttgatggcagtgttttatacacagaaagacagctgcatggaaaacaaaattctgctgggagtaaatggaggcctgtgcctgcttatatcattggtagccatctcaccctgggtccaaaatcgtaagcatgtttttttccattcttcgttacttatattttcctaagtgtctttgagcaaacccaatggctttttttgttttgttttgtttgtttggaactagtgtattccttaacttactgtggatgtgtcagcagtaggcaaggtggggctccagtctcttcatatctcatgctcgagctgtgatagccaagcatttctcatgtcgagaaagacctgaacgtaacgaagtcaatgaataggaagatactgcctttgctaaataatgtaccacaaagagcctttaaatgggaaatgccttccgtgtatatcaagatcaggtgtttatgagcttgcctacaatctctgtgtaaaagttgaatgaaagggccgcagaaggggttggttctggggtcatctttcactcaaggctgtggacagtgtggtctgggagtcaggaagcaggacatcccatcccagctcagccagcagctggcccatgtgctaaccttccttagacccaggttcttcctcagtaaactcagtggaaacatgtgagcctgaccttgctcattgttgtttcaaagccggaaggaagagacagtgggatctgaaagtgctttaggaagtataaatgtgaattgccatttataaactactcttggtttcttaagccagggtatagtgtctttgggcttacagtgagatgtccctggtctgattttttttgtgggtgtcggaccctataggtgatgaaaatgcacatgacattcaggttctaggtaggaaaatacaggcaataaatgtacagcccccttgaatcatttctaaaatagtggtttaaaaaggcaactagtggtcgggcgcagttgttcatgcctgtaatcccagcactttgggaggctgaggcaggcagatcgtctgaggtcaggagttcaagactagcctggccaacttcgggaaaccccgtctctacaaaaaaatacccagaaaattagccagccatggtgggacacgcctgtattcccagctacccgggaggctgagaggcaggagaattgcttgaacccgggaggcggggcttgcagtgagccaagatcccaccactgcactccagcctgggtgacagtgagactctgtgtcgaaaaaaaaaaaggcaactagtcacaaataatttgttttcttctattaaaaattttaagaccattattgaaattgagagtattattctcctaatccctttaattgatcagttaagagttcctagaacaacttgatattccgattaaaatctttgggttaagtcctaccttttgaaatagggataatgttttgaaatacttggtttaataccattaggtgctaaggaaaatcttattcccttgccaaagagcaacattataacagggtctattttatgtctttattggtaattacaatttaataatgataattttggaaacaaatttgaccaaagggaagactgagtaaaaactgcatccttttatgtcggcaagtggtcgaaaatttcgcaggaaagaaagagagatcccttatcacatcctggttactctgaaggatctgaacccttagtttccttgaaatattataactttcaaaaaataacagatggcttgtgaagtttcagagaaaaatgaacacttatacactgttggtgggaatgtaaattagttcaaccatagtggaaagcagggtggcaattcctcaaagacctaaaaacaaaactatcattaggtccagcaatctcattactgggtatatacccaaaagaatataaatggttctcacataaagacacaggcattcacaatagcaaagatatggaatcaccgacatgcccgtcaatggtagattgaataaagaaaatgtggtacatatacactatggaatctatggaatacggtgtagccataaaaaggaaagagatcatgtcctttgcaggaacgtggatggggctggaggacattatccttagcaaactaacacaggaacagaaaaccaaataccacatgttcttgcttaaaagtgggagctaaatgatgagaacatgtggacacatagaggggaacaacacacactggggcctatcagagggtggaggtgggaggaaggagaggatcaggaaagataactaatgggtactaggcttaatacctgggtgacgaaataatctatatgacaaacccctgtggcaattttccccttacaacaaacctgcacatacacccctaaacctaaaataaaagttaaaaataaatgaataaataaataaataaccttaaagccattctcccagtgaatgctgagccccatagccttcctctttagccaagagcagttcttgtattctgtccccaaaagctttttgatcattggcaggtaagagctttttgccctgtcatagactgtagtatgtgatgaccttgtagaatccagaatacatcccctatgaaatctggtttaccacttactcccctccccaattaagctatgtggttttatcaacaactatggtaattttttttctgatcttgtgatttaagaactaatgttacaaacctcagggagactagttagtgtgttttaagtgtagccataggcttgataaagtattggtagataacttggcagaacctgatgtctttgaagtagcaatgttcagttcagcgtgtaactctctcccccttaatatctttttagttttatctgagaaacatactacatttttttctcttttctttcctttaaaggtggatgctcaagtttgaggactgtcatggggactatcaggttttttaggcatgtgctttctttttcttcaaattaaaacctgttgtctgtctcttgtcacttttcaggacagccacactcggggctcttacaatcaggggtcataagctgctatgtcacctacctcaccttctcagctctgtccagcaaacctgcagaagtaggtaagccagcctgttagtgggcttgtgtttgcggtgtgaatattttcattcatggaggaatgagctattgtttaaatattggagaggccttggagatagagagcagaaagatggttaccagaggctgggaagggtttgggaggaggttaggatgattaatgggtacaaaataaataggaagaatgaataagacctagtatttgatagcacaacagggtgactatagtcaaatttaattgtacatttaaaaataactaaaagagtataattggattgcttgtataacacaaaagatcagtgcatgaggggatgggtaccccattttagatgacgtgattgttacatgtttcacacctgtattaaaacatctcatgtaccacagaaatatgtacgcctactatgtatccacaaaaattaagttaaaaaataaaaataaacgttagaaatgtaccaaatcacagtagagagatgatctagactttttcatgaaaaagtctttaacttgagctatgtaaaggaaaattccctttttcgattcttcctggtgtgtaggacagacaggaggaaaggtttggctgtggagtttgcttttaggcctaaataacctccttagttgtatttcttttcttttctgactatagcagtggaataaagagtggaaagaatgtgggggagtggggagcagggagcaggatctgagcacagatccatgatttactggctatgtgacctcaaaccactcgtcttaaatgacatttatttacagagacaacagaacatagtgattagagcatgagctttgaagtcggactgcctggtttatagactgatcctgctacttaagtaacttgcagaaacttacttatcctctctattacttatgtgatgtataaatgtaaatatacacagacatacatacatatatacatacatacacataagcatatataaatgtatgtttgagtatatttgagcttatataagtcaaataaatgtagtgtctaagagaattgaagttgtttcctcttttaaatttggaaagctggtgcaatgataattttgaaagttttagcatatacacatagtatttatgggtttgtccttgttgctgtttatagtggaaagtaatgtaagtggaggtcttaagtaactattgcctaacctggatttaagttttttttttaaatactctatcttgactctgtaagtttacataaatttagtctctttaagactttcttttatgactgtttatgtattaatttctggctttaacttactgggatttttatttacaatattttttaaatggcaggtatccctttaaaacagaaaaaaaaggctgagcgtggtggcacatgcctgtaatctaagcaccttgggaggctgaggcaggaagattgcttgcagccaggagctgagaccagccttggcaacatagcatctctacaaaaaaaaaaaaaaaaaaaaacagaaaaaaagttattttaaatttcaagtgctctacatttttttaattagcctaagaataaagattcttgaaaccacagcatacacagggaagtttatagcattaaatgcctatatgaaaaaagcagaaagattacaaattaacaacctaacattgcacctggaactagaaaatcaagaagaaatcaaacccaaagttagcagaacaaaagaaataacaaagatcagggctgtgtgagttggctcatgcttgtaatcctagcactttgggaggttgaggcaggcagattgcaggagcccaggagtttgagaccagcctgggcaacatggtgaaaccctgtccctacaaaaaaatacaaaaaattagccaggcatggtggcacatgtctgtagtcccagctactctggaggctgaggtgggaggatcactggagccccagaggttgaggctgcagtgagctgtgagctcttattgcaccactgcactctacccagggcaatagacagggactttgtctcaaaaaaataaaataaaataaggaactaaataaaataaagacccccctcccccccaaaaaaacccatgagaacaatacagaggatcaacaaaacaaaaaaaaggtggtttgttgaaaagataaacaaaattgataagcccctggactaaccaagaagagagaagaccaaatcaacaaaattagaaatgaaaaaggaaaaatcacaataataaccacaaaagtacaaaagatcattacagactattatgaacttccatatacttacaaactagaaaagctagaggaaatggatacatttctggaaagcaagaaggaatagaaatcctaaacaggccaataatgagtagtgatattgaatcagtgatttaaaaaatcttccaataagaaaaagccaggaccgaatggagtcatagccaaatcctaccaaacatataagggagaactaataccaatcctcctgaaattgtgccaaaaaatggaggaggagagaactctccctgactcattatacaaggccagatatatcaccctgaaaaccaaaaccagacaaggacacaacaaaaaaaaattacagaccaatacccctgatgaacatagatggaaaaatcttcaacaaaatactagcaaacacgatgtaatagtacatcagaagataatataccatgatcaagtgggtattataccatggatgcaagaatggttcaacatatgcaaattaataaatatgatacatcatacattacatattacataaacagaattaaagataaaaaccatatgatcatttcaatagatgcagaaaaagcatttgttaaaattcagcatcttttcatggtaaaaaaaaaaaccctcaataaagtaggaacataacttaaaataatagaaggaatacaacttaaaataataaaggtcatatatgataagcccgcagccagtatcatactgagtggggaaaaatgggaagcattacttttgagaactgaaccaagataagggtgcctgccttcaccatgcctattcaccatagtactggaagtcctagccaggacactcaggcaagaggaagaaataaaaggtatccaaattggaagagaggaagtcaaattgtcgtgtttgttgatgatgtgattctatatctagaaaacccaaaaggctccaccaaaacactgttagatttgagtaatgaattcagtaatattgcagtatacaaagtcaacatacaaaaattagtagtgttttggctgggtgcattggctcacatctgtaatcccagcactttgggagggcagggtgggtggatcatttgaggtcgggagcttgagaccagcttggccaacatggtgagacctcgtgtctactaaaaatacaaaaattagccagtcatagtggtgtgcacatctgtaatcccaactacttgggaggctgagacaggagaatcacttgaacctgggagggggagggatcttggctcactagccaagatcgcactacagcacccctgcaccccagcctggacaacagagtgaaactccgcctcaaaaaaaaaaagtcagtagtgtttctatacaccagtaatcatctagcagagaaccaaatcaagaagccagtcccatttacaatggctacaaaaaataaaataactaggaataaatttaacgaaggacgtgaaagatctttacaatgaaaactactaaacattgatgaaaaacttaaaaggaggggccatgtgtagtttcacatccctgtgatcccagcactttgggaggccaaggtgggaggatggcttgaggccaggaatttgaggccggcctgagcaacatagggaaatcccatctctacaaaaaatttacaaattagctgagtgtggtggcatgcacctgtagttctagctactcatgggtccgaggttggaggatcacctgagcccaggagcttgaggttatggtgagctatgatcaggccactgtactccagactgggtgaaagagcaagaccacgtctcaaaaaaataaaaataaaaaggatgcaagcgaatggaaagacatcccatgctcatggatcaggagaataaatattgttaaaatgaccatattgcctaaagcagtcttacagatttagcgctatccctatcaaaataccaatgacatttttcacagaaaaacaatcctaaaatttgtatagaaacaacagagccagaatagctaaagcaatcctaagcaaaaagaacaaaacttggaggaatcacacttcaaagctggaggagtcccttcttcaaattatgctacaaagctacagtaagcaaaacagcatgatatttgtataagaatagatccatggaaccacatagagaacccagaagtaaagccacatatttatagccatctggtctttgacaaagttgacaagaacacacactggggaaaggatacccttttcaataagtggtcctggaaaatttggatttccatatgctgaacccctaccgaacccctgtctctcaccacatacaaaaatcaacaaaaatcaacaaaaggtggattaaagacttacatgtaagacctgaaactgtaaaaatgctagaagaaaacctaggaaaactcttctggatattgctcaagggaaataattcatgactaagacctcaaaagcacagacaacaaaaacaaaaccagacaaatggaactatgttaatctaattagcttctgtacagcaaaagaaataatcaacagagtgaagagacaacctgcagaatcagagaaaatatttgcaaactgtgtcttataggggagcaatatgcagaatttacaaggaacacaattcaacaacaaaaaacaccaaataatcccattaaaaagtagtcaaagaacatgaatagacatttcattttttttctaaagaagacatataaatggccaacaggcatttgaaaaaaatgctcaacattgctaatcatcagagaaatgcaaattaaaaccataactagatgtcatttcacaccagtcagagtggctattattaaaaagacaaaaagtaacagatgttggtaaggatgtggagaaacggaaacacttatactgttgatgggaatgtaaattagcatagcttctatgggaaacagtgggagatttctcagagaactaaaaatagagctaccatttgattcagcaatcccactactgggtagctacaaaaaggaaaataaatcattatatcaaaaagataactgcacctctgtgtttatcgcagcactgttcacaatagcaaagataaggaatcacctttaagtgtccatcaacagatgattggataaagaaaatgtgatttttatatatatacatacatacatatatatatatacacgtgtgtatatatatacacgtatatatacacgtatatatatacatatacacacatatatacatatatatacacacacatatatatatacacatatatatacacacacacacacatatatatatctatctccacacaatggaatactattcagccataaaaaagaatgaaatcctgtcttttgtagcaacatggatggaactggaagccattatcttaagtgaaacaagcagacacagacaaatactgcatgttctcacttttaagtgggagctaaataatgtgtacacatggacatgagtgtggaatgatagtgaagactcaaacataggaaggagggaggggatggatggtgagaaattacttaatgggtagaatacacattatttggtgatagatacactaaaagccaagacttcaccactacatgtaaaaaagttacacttgtaccccataaatttatacaaataataaaagattccttaaaccacagcatacatagttacgtttactgtttcaagtgcaaatactagtcataattttagtctcacttcagacacttgaaatatgcacgtttgtaaagtggtttctagagtgttactttatgttacttgctttggtggcaaagttggcagtcagacctaggttgggtgttccaaatggaagactccatgttaggtaaaaggtaaattaccactgatggttatattataggaatctttgttacgtagtgtttagaataactcagtttttcttactgtttcacactacaacagtcaacacagaaggtttctgtgacactaaaataagtggagatttctccccaccagcaagcaggcagtggacatcagttgggtgtcctccaatccaattcggatgctctacctggagataaggtcagatcccacaggtcgaaggctcaattccacaaaacagccctaccattcccactggtcacaagtccggccctccagaacttctgaccaactgttagggctcccacagttaccccttctttgggatggattaatttgatagagtggctcacagatctcaggaaatacttatctttactgatttattacaaaggatattttaaagaatatgaataaacaggcaggtaaaaatatatataaggcaaggtctcaaagggtcctgagctgtctccatgcagttggtgtggctgggttcctaacatgtggatgaggtggtgttcaccttcctgtaagcctccagctctcaggaagctttctgaaccatgtccttttgggccttttatggagacttcattacacaggcatgattgattaaatgattaaaccattggcccttggtgatcaactaccattcctcccattcctggagtttggagagtgggtctgaaagtcccagccctctaatcctaccttggtctttctggtgaccagcccccatcctgaggctacctaggggctgccagccattagtcagtcattaacatataaaaagacaccattttggagatttcaaagattttaggagttgcatgcaagtaaatgcgaatgaagaccaaatatatatttcacaatatcacatgtagccactcacattaaaaaaaaaacacacctcaggagtttccaagttacagacagaaagataccacgattatcatatcacttacagcaaaatgacttctcaactagtttaggagctattgttggctgttgattcacctcagcactgcttggtatctgcaccctacctctctttagaggctgccttgtcaactgaaaaatgcacctgacttcgagcaagactctttccttaggttctggatctgtttgagccccatggcactgagctggaatctgagggtcttgttccaaggatgtgatgatgtgggagaatgttctttgaaagagcagaaatccagtctgcatggaaacagcctgtagagtagaagtttccagtgataagtgttcactgttctaaggaggtacaccacagctacctgaattttcccaaaatgagtgcttctgtgcgttacaactggcctttgtacttgactgtgatgactttgttttttcttttcaagttctagatgaacatgggaaaaatgttacaatctgtgtgcctgactttggtcaagacctgtacagagatgaaaacttggtgactatactggggaccagcctcttaatcggatgtatcttgtattcatggtaagtcttgggagttactcaaggtcacttttgcagactttaaaattacaggaaaagaattgaaataactttcagtagctgtgaggctgcaaccatttgaggaggggggaaaataaccacaagtaaaaaggcgaagagcgtgaactcatatttgaacttcgttcaccttacttgtttttatttggggtaaataaagcaaatatatggtatgtaaatatttgaacttcgtttaccttacttgtttttatttggggtaaataaagcaaatatatggcatgttgcagcaccgttgcctaaccccctttaaaagatggtcgaatagtagtttgctatacctttactggagggcaggggagcacaaagtgaagaagagatagaatgtgccagcatgtcctggcagctttctgatccaaaggaaatagctttcttctgctgttgatggaaagagtacagagtgctgtgtgcgtggtcattctgtgcagacaagaaatgttcattctcttttctgctaaacccacaatgctgttgttcactcggcaaagcagctcctccaaaagtagatgtgatatatgagtgggctgtgtttcagatgcttgtggtgggggttattccacctttaaaaggtttaaaaggttgctagagggagaaaagtcaaggatagaaatggctagttaatctggatatatatttcgctgataactaagcttccctttaacagtaaccttttcacatttagcctttacttctgtgtttacattttgttaatgttcagtataaaaattcaattccattgaattcagccataggcacattgtaaacttcctttttgctgaaacgaaatactcctggtggtgatagcttgtataaatataatgtctttctgagcatgttggcattttctcttacctcctttaacaacttctactattagaaagggaccaacggggacacagaccttttagagtctatttgctcagggtcacacatcaagcaataaaatgcttgttgttttacaggtaggtgttaagatgatggtgacatacattcattcttggcctgtgtgacatagtgacagagtctccttgttgttgcagaatggactgtggtaacttctttctggcctttcaattttattaattcctaagttgttcgcagagtacctacaatataggaagcaggctgcgtggtgcagtggctcacgcctataatcccagcactttgggaggctgaggcaggaggatcacttgaacccaggaatttgagaccagcctagacaacatagcaagaccctgtttctacgaaaaaaaaaaaaaatcaggcgtgatggcacgtgcctgtggtcccagctacttgggaggctgagatgggaggatcacttgaacccaggtgtctaaggctgcagtgagctaggggtgtctccactccagcctaagcaaccgagtgagaccctgtcttttgaaaaaccaaccatgaagatatttgatagaataaaatcatgtttttgtgggttactgggtacccaatgaaaaaaaatatttgcccttggccaggcgcggtggctcacgcttgtaatcccagcactttgggaggcaaaggtgggtggatcacctgaggttaggagtttgagaccagcctggccaacatggtgaaaccccatatctactaaaaatacaaaaattagcggggtgtggtggtatgcacctgtaatcccacctactccggaggctgaggctggagaattgcttgaacccaggagggggaggttgcagtgagctgagatcacgccattgcactccagcctgggtaacgagagaaactgtatttcaaaaaaaaaaaaaaaaaagaaaaaaaaaaccctttaaataaagtagagtttggatttgccataaacccttcaatggaaaagatggcaaaaattcttcttagcctgctgcataatggttaccacacatagggcatttcacaacatggaattttcaccctatcatattttctcactatttctagcaggtgtaaagaattcttctgagttggcccttgagtgagagatgataaataaaatgttgtttcttacaggactgaggtaccatagtggagattggtaagggctggtctgatattcccaaaagatgtcaattttcaaagttgatagctactaaaaaaaaaatctgtctaaataccagcaacaaacattgttattgaattcgtaaaccacaaaactgcagtgtatggtgggatgagaacatataaaactgcagcccctacaaagtggagatgaggatgaccactctgctctgtagcgtacttctgtaatctgtaggcaagagcacactctgtgggctgggccccctaggagttagttcccccggggtccatgtgattgatgtttgctgtaattactcactgcagctcttcgaggggtcagctttaagaacactaaattcaggctttgtagggcctgggaataaaaggaatgctgtaggggtgggagttagcccaactagggttttttcagatctggacttctgaagagtttgttttccttcctgactcagaggaatgaaaggttggaggatgttacaaaaaggccacatcgtccgtgtgggaactgtcatttgaacataattgcaggaatatctaggattcttgatagaaattgcaggaagccagagactatagatagtatgtaagttaaaaggagaagaaggccaagattgcctggggtccactcttgtaaagttgtagaagactggaaatctccctagctcctctctttcccttcgccctccagagcccccaagccccacccccaaatacttgtttcctttggggtatctccatcctgactcttgcagctggggtactctctaggagtatgttttaatgtttgtagcctcagctcagaagaagggctcaacccaaacctactccctgcctttctgcctggggctgccttctctccagagcctccttccattgcacccaggaatcattgctgtgaaagaacatcatagcttggaccccatgtaagccctaaccttggtccacttgtgggagttctctgatagctctttttatttttttagataaaaaaaaatgttttaaggcaagttctcactatgttacccaggctgggtaaactgtccttaagggatcctcctgcctcagcctcccaagtagctgggactacaggcataaccatgacacctggcattctgatggttttctctctctctctctccttctttcttcctttttttttttgagacggagttttgctctttcacccaggctggagtgcaatggcaggatctcagctcactgcaacctccgcctcccaggttcaagcgattctcctgcctcagcctcctgaggagctgggattataggcgcgtgccaccacgccaccatgcccggctaatttttgtatttttagtagagacggggtttcaccatgttggtcaggctggtctcgaactcccaacctcaggtgatccgcccgccttggcctcccaaagtgctgggattacaggcgtgagccgccatggccagccctgatggctctttctataggcgcatccctccacacccctttagtctggagctttgctgtgacaaatcctggcctccacgaactatttcttaattcttcccttggtctctggattttgattgaaattgttattctgttgccttcaacttcagactgtcagcctggacaggatcccagagttgatcaggtcagtctcctcattgtacatgtaaggaagcatggagcctatacctgtagctctctactcccaacttcgggcaacctttccttgaggctccttttcgggagtatttagggacactggtggatagtctctccccggctctttttcttcagatggcttggtgtaatgtcccctgagggagaaagataaactggatgacttgcgtaattatattattacaaggcatttgcactataaagtttcctgaccattccacttttatctgtgtttaagagaaaaaataattcttaatattgaaccatctttgaaaatatccttttaaatataaaactggaaaaagtaagaatctttattcaatgtcaaacaacttcctagtttgaagtggggaggttcgcaggttggtgtgatagcattgccgaggggattgttctacattaaaaaaagttgggaaatcaaggaagaatatttatttttttggtacattctgggcctttatgggggggtggggaaatttgtatcttccccaccaggagagggggagatttgtgtcttcattttgggaattctgctctggcctgcctgccagctagaaatctccaagttagaaatcttccaccccgtggccaggcgtgatggctcacgcctgtaatcccagcaccttgggagggcaaggcgggtggatcgtctgaggtcaggagttcaagaccagcctgaccaaaatggagaaaccccatctgtactaaaaatacaaaattagccgggcatggtggtgcatgcctgtaaccccagctactcgggaggctgagacaggagaatcgtttgaacccagaagacagaggttgtggtgagccgacatcgagccattgcactacagcctgggcaaaaagagtgaaactccatctccagaaaaaaaaaggaaagaaagaaaaagaaatcttccaccccatgccccaggttcacagagagctcaggtctcctttgggttctatagcacaggggagcatgactgatcttcatcattgcacaaaggctgggaatagtcacgggatctgtcaagggcctaccctgtacgtttgtcagggaggcggaatgtgtgatctccaggaaagtttggacgtgttatttagagattttctgtggtctagtggactttggccagcttcaaaagcatctgcagtgccagtgttgaggggcacctgcattgtgcattcttctgccagtgtgaaggggttctgggcactgtagtggttctgcagggaaacaggacacggcttttcttttttttttttttggctgtcaccatgactgcagagcactgctggcattttggctgggttggggtggggtggcagcaggcagagacagtaaacacgctgtggtgtgttaggcattctccgtacaataaagcattgtcttaacccaatgctgtaagtctcctcctatccccacgggaaatactgggttaaagtcacacctatcttagcacaggaagaggtaaggcttataggtaacccaggaattgttttatagcaatttgtgctgtgctcaccaaacagtggtctttgtaatagcctgaatgcagataataagaatttcctaggctttaagagcttataaaaaaaaaaccttttcttgataattccaagaagagtgttgtatggagaaaggctacaactgaataaagatctttttttttttcctgcaacatctgcctcccgggttcaagcaattctcttgcctcagtctcccgagtagctgggattacaggcgccccccaccatgcccggctaatttttatatttttagtagagacagggtctcaccatgttggctaggctggtctcgaattcctgacctcaggtgatctgcccgcttcagcctcccaaagtgttgggattacagatgtgagccaccacgcccggcaactgaataaagatcttaatgtagggtaacatctacctgtagaagtcacatggcattaatgatgctctgaatgtagttctttttaaaagtaaaatcaaaagcttccccatgttaggcctctttgatggtgaagtggcaaaggagcccaaatcaagagctttgttttccggaaattacgttaacccaaagaatttatagagtagaatatttactctgaggctttgtttttctttttgagacagagtctcactttctcgcccaggctagagtacagtagcgtgatctcagctcactgcaacctctgcctcctgagtgtcaagcaattttcctgcctcagccccctgagcagctgggattacagctgccggccaccacacctggctaatttttgtatttttactatagatggggttttgccatgttggccaggctggtctggaactcctgacctcaagggatccacccgccttggcctcccaaagtgctgggattacaggcgtgaaccactgcacctggcctattctgagcctcataaataatgaatgttaacctttcaaatgaaaatttcagatagtgatctcttcttaaaattaaaaacttatcttttcccctgtgaaaactatacactgtactaaatcaaaacttgtatgcacaggatatgtgccactcttttttttttttttttgagacagggtccttctgtcactcaggctgaagtgcactggtgtgatcatgctcactacaacctcccaggctcaatttattctcctgcttcagcctccccagtagctgggactgcagacatgtgccaccacacctggctaatttttgtattttttgtagcgacagggttttgccaagttgtccaagctggtctcgaactcctgggctcaagcgatctacctgccacagcctcccaaagtgctgagattacaggtgtgagccaccacacccagccgggccactcttaaatgtcggattaggtgttgtgttccttgggtgcgcagtcattgggagatgtttctgtcttcctctgaccaggcacacagtcaggaggtggagtggcatgggcctggattagcatgcatcagttcaaagcagaaatgaaagtgatgctgttgtacttgagtggaccacaaaagaaacagtgaacttggatctcagtgggcttctgtatgagaaagctttttattgtttatctctgtctcattgatctctctccttgggaaagaggatgagactgcgcagtgttgcctcatggggttcgctggattgagatgagtgtgtgtccccacctttccatgagcagaccagcttcttgagcaccaacacgcccgcccatgtcaggccagcacagaagctacatgacggcaggattgttgcctgtgtcactgagtccccagtgcttagaatcgggcctgacacatagtggccttcagtaaatatttgctaaatcaatctgtaaagttagctggaaccctaagtattgtatatatttgcttaaaatgttctgtgtttttgttttgtagagatgaggtcttgctatgttgctcaggctcttctcaaactcctggcctcaagtgatccttccaccccttcctctcagagtattacaggcatgagccaccacttctggcctgtttttgttttcaggaaaaataaattattttgccccatgcaaggcaatttgtctaacattttacctttctaggtctcagggaagtggcagaattttttattacctcgactgctactcttccaaacagcaagccttgttctactataggctatcacagtaaataactgcgacttttgctttcatgcccttgctttctgttgccatctctgggctcgttgcttttgattccctctaagcaagactagtcaaagggagggaaagataaactgaaattagaaaactattgtagcatttgagggaggagaggcaaaaagcaatactgaaaaccaagatatcttacttctctacctacaaccttctttgcataaaatgatctaatgcaatccatgtaaaatgatatcaactatagaataagccagccaattttggaataaggagaggtattaaaatagattgctttgatttaagtctcctgaacggtaggttacattgaggctctcgtcggagcactggccagccggctttccccttcattccatgtgttgtaatgtgttaatatgcccagctgacgtttttgtctgtttcttagtttgacatcaacaacaagatcgagttctgacgctctgcaggggcgatacgcagctcctgaattggaggtaagttcatttccttttcctgtcctgcttcatctcagaagatccatttctcaggagggccttttgtgtttgtgtctttatcagtctgcattccgtgatcctgtttttctgctgaggaaagatttttgtatagaaaaataaatgctggccgggtgtggtggctcacgcctgtaatcccagcactttgggagtccgaggcgggtggatcacctgaggtcaggagttcaagaccagcctggccaacatggtgaaaccccatctctactaaaaatacaaaaattagccaggcatggttgctcacacctgtagtcccagctacttgggaggctgagacgcgagaatcacttgaaccctggtggcagaggttgcagtgagccaaggtcataccactgcactccagcctgggcaatagagtgacactttgactcaaaaaaataaaataaaaaagaaaaataaatgctttcctgctttcctttgtatgctatgggattaaaatgaatcagtccattcttgattttctgtaagaaagctggcctcttgggtggcatcctgccgctcacccccaaccagaggctcaggtaaccttgtcaggctgcaccctgcgctcttcccttgccgtagtggagtcttggtgggttttattttaacttctgatccacccacctgtttcatacttgtctgtgccctccatacacagcgtggctgtgagattatgtaatagctgtttggaagaaaggagagaggaaagggaaggaaccatatctgctctgcctgacgctgttgaacgttgtagatacattaactcatttgtcagttccatcaggtgggcgttttgtcaggtagagtgttatggacaatacatacattggttgcctgcacatccaaagcctcaaggtgttcagcagatgcctatcagtcaacaaaatgtctgttattttcttaattgtgcaagagtctttctggggctctcatctaccaacaacagcaaggtctaatcagatggaggcagccagggaaggactcagctgtgacccaagaacgaaaagaaccaggggttccaaagatggctaagacttacagcacttgctatgtcccaggcactgttctaagttcttcctatgtgatttcacttaatcctcataaaaacccagtgacgtgctattacctccattttacagaggggaaaaccagaagagttaagtcatttaagcctcacaggttttgatttgccagaatataaaccgtgtactctggccccaggatctgtgttcttgaccactgctgcccaggagctgagctgctgaaccctggtccttgctgctgactgcgggcagctggtttctggccactgcctgcgttttaatagctttccgtggatggaaaagccctggtgtctgtctagatatgggcattttactctgcagctgggtgtctggggttggtctctcttgcacctgacctggatatagtgagccattatgaagggctgtcaatctgccaacatcattcaccaactctttctgttgcctaaaggagaaaattgtgctgagtttgaataggttactgcctattatagagaagagaatggtctgtagaaggggtgtttattctcaccattgactaggtgaccacctgctgaggttgcatggttatggtttcaatgtccctattgtgtacagagttcaagctcaaagaacagcaagtctccaagttagatttaagagaggatgtttttcttctcagtccaagggaaaatgtccgagtgtttccttctgaactggagagcatgcgggatggaagttggtttgctctcctgcgtcacatttcacaggatacaactttgaaagtgagagttcatagtttcttatggtaacttgaacttcaaaataactaagacctcagcataccgtgtcttgggcccactgaatgaattagtggtttttagaccatggcacttaatccaagctcctgttaaggctaatacctccgttaaaggtttccttgccaagcagggaaacaagggcttggccttgatacacaaatgagatgaaggctcaagctctcatattcttatccttggctctctgttctttgtagttgaaatatcttcagccacaaagtgctaagggccctgcacttcccaggctgtcttagtactctgtttaccagagtccttctgaaatcacatactttttttctttgcttttttttttttgagacagggcctcactctgtcacccaggctggagtgcagtggtgggatcacagcttactgcagcatcaaactcatgggcttaagcagtcttcctccctcagtctcccaaatagctgggactatacataacctgattttttaaaattaagtttattgttttgagtaggtaagaaataatggccgggtgcagtggctcacggctgtaatcccagcactttgggaggccgaggtgggtggatcacctgaggcctggagttcgagaccagcctgaccaacatggaaaaaccccgtctctactaaaaatacaaaattagccaggcatggtggcacatgcctgtaatcccagctacttgggaggctgaggcaggataattgcttgaacccaggaggcagaggttgcagtgagccgagatcgtgccattgcactccagcctgggcaataagagcaaatctccatctcaaaaaaaaaaaaaaaaaagaataaaaaatacgcaaggtaccagagatgcttcaaaggcaagcattccctccatccctgcccacggcccgtgcaacagcttgattttgataggaaacatgggtaggctgcttccagattccttcactttactatttcagatcctaccagcttcgccaagctcctagataccacgtgttacctattgtgaatcatggatcttggtgtccccatcctgcattcgtctgttccagctctgtcactaagctagtttggtgactttggccagttaacctgcctgacctcagtttcctcagctgtacacaggataataataagcccaatgcaaaggtcaaagagggtttaatgaaataacattgaaagcaaagcacgagaagggagcaccaggagagtggggctcttgtcacgttcattgggtttcacattgagttctccagaagcagaggctgaggcagtttgttgcgtgggatatttattaaaagtcagcacatgtgggagggagaaggggaaggggaggcaaaattgggcagagggtgaagttgaaggacagtgcagctggacaaagcctccctaaccctaggagccataaaggcacggcctttacccctgccatgatcagccattccatggcagttacccaggaagggtaaaggagctcctgtctcgaggctctgctctcagcattcatggtagcaggagcgagcaccaagtccacggatgaggatctctgtggcacatctccctccatggggtttcctgtcaccaacacccagcacacctgggaaagaacagtccacatcttttgaagggcctgggaggtggttcaaataagggttactgttgccttgctgaggtggactagaaatagaacacaagccgcctgactgttgcttttgctttcacagatagctcgctgttgtttttgcttcagtcctggtggagagggtaagcagagcgcttttattctttgcacctgtgtggcactgcagacctataactctaatctgtagtcatttgggattcagacacaaataacttgaatagtaaggagaaagttttattctaaagctgacttactacttatacacttttcacattcttcctgaaggatagctgagttttgtttgtgttggtattctggtagagagaatcagtccaaattttggtttaaatgtaagttaaattatacagtgagatttagagaatcagagagcacattttttaaaaaggagtgatttggaaaataccaagaggtcctgacaccttattttggggccatttcattccttcaccttactttccaaggtggattggaggattccaagggcttgagaactaactcttgttttactctcactttctgctgagcttatagtaagttttacgtctttaagggtttttaagggttctctttctgttaaaataaatgtggcagggcaggcacggtggcttatgcctgtaatcccagcacttcgggaggctgaggtgggtggatcacctgaggtcaggagttcgagaccagcctggccaacatggcaaaaccctgtctctactaaaaaacaatacaaaattagccgggcgtggtggcgtgtgcctgtaatcccagctacttgggaggctgaggcaggagaatcgcttgaacctgggaggtggaggttgcagtgacccaagatcatgccactgtactccagccggggcaaaaagagtgaaactccatctcaaaaaataaataaataaaaataaatgtggcattaggtaactcttcctgttacggaagttgctagggtggagtgggggttttgtgcttagggcacagattgaagttgccagagggtacagatggctttctggcatcttttctactgacagccctgtagaattagcgagcgtgactttgctgaatggtaaacacacacattcactcattgagcctgggctccctctgtgcttcacagacactgaagagcagcagccggggaaggagggaccacgggtcatttatgacgagaagaaaggcaccgtctacatctactcctacttccacttcgtgttcttcctagcttccctgtatgtgatgatgaccgtcaccaactggttcaagtgagtggcccatttgcttaggtatttttgaagcaaagccttaaagttaagagttaagtactgttcgtgtttgtttgtttgagaaggagtctcactctgttgcccaggctggagtgcagtggcacgatcctggctcactgcaacctctgcttcccaggttcaagcgattcttgtgcctcagcctcccgagtagctgggattacatgcatgtaccaccatgcctagctaatttttatatttttagttgagacggggttttgccatgttggccaggctggtcttgaactcctgacctcaagtgatccacctgccttggcctctcaaagtgctgggattacaagcgagttctgagttttaacagtggatgggtatgttttaaccctggaaactggtgatgcttatggcaactttaagaaaatggaaagttagctctatatggacagtctggaaaacatggtaatgaaggaaaaataggaactcctaagcattcatctgcctttcagaaagagaaaatatcccttttttttctacttcaaattttgtgtatctttttccccatttttcttcattttcattacaaaaattggaaacatctttttttaaaatacaaactaaatgtggaattatgaaaagtaacaatgtggtacccccccgcctctacttcccccacacagataaccactgctaggatgtgtatccttctccttttctgtgcatttataaacctctgtagtttttttttgtttttagttggagtcttgctttgtcacccaggctggagtgcagtggcgcaatctcggcttcactgcaacctccgcccctgggttcaagtgattctcctgcctcagccttttgagtagctgggattacaggtgctgccaccacactggctaatttttttttttattatttttagtagagacggagtttcaccatattggctaggctggtctcgaactcctgaccttgtgatccacctgcctcagcctcccaagtgctgagattataggcatgatccaccatgtccagctaattttttttttaacataaatgtcattatacatgttttcccctggaggcttttttttttttaacttggcagtacatgattgacctggccttccctggcactacacagaggttcatactttttctacaggtccacagctttggttgtatcataatttttttgaccactaagttaagcttagacatgtaggctcattgtgcttccttttatcattcattcaacagatgtgcaagtggctcctatgtgccacacggttctatgaggcaggatttatagtccagcaggagagacagactatgacgcaagtcaaatatggtgtgttagatggtgatgagtattggggagaaaaataaaattaggagagggaattggggtaggggtggtgggagtggtgnnnnnnnnnnnnnnnnnnnnnnnnnnnnnnnnnnnnnnnnnnnnnnnnnnnnnnnnnnnnnnnnnnnnnnnnnnnnnnnnnnnnnnnnnnnnnnnnnnnnnnnnnnnnnnnnnnnnnnnnnnnnnnnnnnnnnnnnnnnnnnnnnnnnnnnnnnnnnnnnnnnnnnnnnnnnnnnnnnnnnnnnnnnnnnnnnnnnnnnnnnnnnnnnnnnnnnnnnnnnnnnnnnnnnnnnnnnnnnnnnnnnnnnnnnnnnnnnnnnnnnnnnnnnnnnnnnnnnnnnnnnnnnnnnnnnnnnnnnnnnnnnnnnnnnnnnnnnnnnnnnnnnnnnnnnnnnnnnnnnnnnnnnnnnnnnnnnnnnnnnnnnnnnnnnnnnnnnnnnnnnnnnnnnnnnnnnnnnnnnnnnnnnnnnnnnnnnnnnnnnnnnnnnnnnnnnnnnnnnnnnnnnnnnnnnnnnnnnnnnnnnnnnnnnnnnnnnnnnnnnnnnnnnnnnnnnnnnnnnnnnnnnnnnnnnnnnnnnnnnnnnnnnnnnnnnnnnnnnnttaagaaaagatggagaaggctataattaaaaaggcagataataacaaatgtcgaggaagtggagaaattggaaccctcttacattgctggtttgaatgtgaaatctgctttggaaaagagtttggcatctccttaaacaattaaacattgagttacaatgtaatccagctcttccactactcctgagcgtatacctaagacaaaaagaaaactaggtccacaaaacttacacagcggtgttcatacaagcatcattggtgataatcaaaaaggggaaacatcccaaatgaccatcagctggtgactgcctaaacaaaatgtgctctatccatacaataagatactatttagcagtaaaaaggaatgaaggactgacacatgctgccgcgtggctgagccttggaaattgtatgccaggcaaaaaagccacacacaagagaccatgtgattccttttatatcaactgtccagaataggcaaattcatagaggcagaaagtagattggtgaatgcggggggtgggctgagggggccatggggaaggggagagcacctaaggggtgcatgatttcttttgggggtgatgagaatgtttggaaatgggtagtgttgatggtagcacaagtctgtgtatgaatacattgaaagccgttgaattatacattataaatggatgtgaattagtgaattgtatctcaatatattcctgctttgaccgcggctaggtgtcttgtttccacagctacgaaagtgccaacatcgagagcttcttcagcgggagctggtccatcttctgggtcaagatggcctcctgctggatatgcgtgctgttgtacctgtgtacgctggtcgctcccctctgctgccccacccgggagttctctgtgtgatgatatcggcggtcccctgggctttgtgggcctacagcctggaaagtgccatcttttgaacagtgtccccggggcagggactggcgccctgtgcctgagtgggtctgaaaaagctttgagagagaaaaaaaaaaatctcctgattagctttttacttttgaaattcaaaaagaaactaccagtttgtcccaaaggaattgaaattttcaaccaaactgatcatggttgaaatatcttacccctaggaactggataccagttatgttgacttccttctgcatgtttttgccaaaacagaatttggggcacagcatcttttcacagggataaaaatatcttgtggggccagtcattctcatcctcggaatagaaaaacatgccaaaatcttgagtccccagcgcctaacagaatccagacccctctcactcacttccgcctcttagagccttgtccccagggggctttgaggacaggactcagcctgcagggcccctggtatttatagggtccaagaggaggcacctgcttttcaactgcaccctcagtgctgcctcttcacggcccctaaacgtttccctttgaggttgtgatgctgggaatcacagacttcactctctgcctgcacccttccccgaggtctcatcttttctgggtcccacatctttgtaataatgtgaaaaagcacaatttgtctgatcaccccccaggtggttccccaccttattatcactacctgatccgagttactgcaataagtacggcgcttatttatggtgttattcacatgattatagaacaagattcatgttttctctgcctaagcaatggagggctatcattcttacttgtttgtgctgttgataatgataatacttttaggaccttaactgaaaagctgcttcgtgttgaagcctgctgcatgcactgctctttcagttgttgaggtcagcccctcagttttttctccaccttgaggcctttgaaactgtaaaagcggaagtcgttttgtgttctggatctgtaacgtgaccataccgttcaggttcatgctggcatccttggagtaggtttgctaatgtgagaatttctgaggtgaggatctcagacacactgaccagaagaagcttgttaggcaatgtgtggaagtggccgaatatacttaaaaagaggtgggcagaggcaggcggatcacttgaggtcaggagttgcaagaccagcctggctaacatggtgaaaccctgtctctattaaaaatagaaaaattagccgggcatggtagcgtgtgcctgtaatgccagctactcggaggctgaggcatgagaatcacttgaacccgggaggcggaggttgcagtgagccgagatcacgctgcacaggaatttccaaaatacgtacttgcaaagtaatacagaaacgtgactttcggcagctacccaagatgatgcctattttcagtgttgatgtattcaggcagggaaaaggtttacttggtggaaactcctgttagaatttcattcggggtggaaagaatcttctcgagctctctgtaagtgaggatctaagaataaaaggctcagcctagtcatttttttctgtgccctactgtatgagttgggcagaattgagtgccacctaagctgggcttctgtgtgccaaaatgctggtgggtgaaattagtgaaattctttctattcattcctttgcccttctcccaagaaaacccatggggaaacaaattacaggggatgaattcctttagaactttccctacttagagtgtttgagattcagtttcaaaaggcactccatctgtgtgtgtggtttagagagccttgttttgtaaattccattaaatttccttttttagggcaggagctctgtactcagcagttaaaagattcatctggagtcgcaaaatgaaaagccgtgttctaacctgaggaatcagttaggggacaggagttccgtgggccaggaatgggctcagggagtggggctgcgtgtcacacacagtagctgtgttgcagtggcctagggccttgggggttgtctttaggaaacaccctgaggggaagcaggtaaagagcctgggcagtattgtgactagtttcattgttttcctcctgctgaggtctagcagagcccttgctttgtcctctcggctgggtctggctgccagctggtgtgatttgagaaactgaccttacgcgcagtcaaggtccagctgacaaggccttgtattccttggctggccgtgattggccctttcctctgcagaaagcagcttagggaagcccaagcaagggagtgtggccggtagaaggccctcgtcgcttccttctggagccagcccagccacacaacgttttccagatgcgtgagtctggtttgtgacatcccgttcccttctgccggttggtctgatgcaagaggaagagttacagttgctctgaattttattctcagctgaaaatgttagcacgtgtatctggatgaacaaaacagatgtggatgtatctgaggattgagggactatcaatgcagagttaatgttaatggttattaattgtgatatacaatactcaggtgaggagtcaacattcctggatttaaagaatctacagttttgtgcaattgtgatttgagaaactggaaacattgtgccaatggctttgagttcctataacaacggtgttaatttgattaactcactgatatcttttaaaaataatagacatttgcttcctacacctttttgtacatgacctaaagagtatattcccagaagctgctggtcagacacatttagggatgacagttgaagaggacttttttaaagctgcatgtgaatatttcctctgtgtgatttgtctgatgtagaaaagttttcccctcatttttatgagtaaaaacactaagtgggtggcaggggggtgggggttcttatgggagtgtcataccgcggcatgttacctgactggagactagagactatttccattataagccttcagaaacccaaccacgtctttactgtgtctagctttttaaatactgattggttagttttatttttgcccacagtttcttgggcaaaaaggttcttcattttgtctgaaaaagaaattatttgccagaggtatttggagcctctttgaaggggagatagagtgggggtgggttgtggggagggtggagttattggggttttggggttctgtttccatacaacattgtttatttccgattcctcagaagatcctttattatgaataacctcagtgtaatgttaatttcctgtccccatgtcaaaattgtcaccctaagcctttttttttttttttttttttttttttggagacgggctcactctgtcagccacgctggagtgcagtgacatgatcttgactcatggcaggcttgacctcctgggctcaaggaccacctcccaagtagctgagaccacaggtttgccccatcacacctggccgatttttatttttttgtagagatggggttgtccaggctggtctcaaactcctgagctcaagcaatgtgcccgccttggcttcccaaagtgctgggattataggcgtaaaccactgcacgcagcctaccctctgcctttttaagatgatgtatttatttaatttttgccatcattggtgcttcaccttcctgcgaaggaaattccagagcctgtatttaagctacctaggcttttacactccctttattgcctttccaaatagtatctcatttggtgtactctagtgtcctatacctcttggaaacgaaagagggcccaacctacaactaagaagggacaaaccttgaactaagtaagaccttacacacccagaaagaacactgggccctccttcttcagggacaatgcagtagccacttggcttgtggaatttactgaaggctatttcctgtaacttgctagttaacttagttttgtatttcaggcagaggtgcgctctgtaatgttgggcctttgacttcacagtactggagagctgttcacacagatgtttagacctttctctctctctctctctctctctctctcttttcttctttctcaacaactctttcacagaggcagtcattttgaaaggttgaaatatttggcctttaccaaagagctttttttttccttaagcaaaatcctttcagaaagaaacaaatggggaagggcagattaagaatgcatatgtcccaatccacttctataggagtttaatcatattcacatgagtaaaatgatggaagaactctttaaggtaatcctttgggataaaggatcctgggaagttctctcaggtaaagaaagcttacagcagatttgtaatatatgtctggagagctatttataagaaatttaagaggattgttttgttttcctttattaaagatttaagcctttttactttgcaaaaagaaaactacaaaagttttatagatataactttgctaattttttaaacttttctgaaacgattagctgtagccaaattatgtggttacgttttgctacattagaatttgaaaatgcaatatgtgtggtaaatctactgtttgaaatttataatggtctctgatatgattcgaattttggtaacttttgaaagttattttccccctttagtcatggatttctatttgttttttaatgttaatttttctagaaagcatctgaattgactaggcttttcctatataaaaaactcaaaacttgttaactctgtactttaataaaatttaaaattaaaactgtgttgtttttttctcttctgctagatacatatataattaaagtactcaagttagttgttttgcagagatgttgccttcagatgttaatcaggtctctcaagtttcatggagtctatgctgatcctttaattgacaaataaaagatatatatctgtggtgtgcaacatgatgttttgaaatatgtatatattcaggaatagccaaatcatgctaattagcatatgcattacctcatgtttttgtgctgagaacatttaaaatctactcacagtaattttttttttctgtttttttggagacagagtcttgctctgtcacccaggctggggtacagtggcgcgatctcggctcactgcaaccaccgcctcccaggctcaagcgattctcttgcctcaacctcccgagtagctgggattacaggcatgtgctatcatgcccaggtaatttttgtatttttagtagagatggggttttgccatgttggccaggctggtcttgaactcctgactacaggtgatctgcccacctcagcctcccaaagtgctgggattacagacgtgagccaccgtgcccggcctactctcagaatttttaaggtacagtgccaggttcctaactctagtcaccgtgttacacagtagatctcctgaacttctggctgatattttgtgttctttgaccaacatcaccctgaactcccccctcgcccagtcccccacctccagcccctagtaaccacctttacactctgcatctcttaagtcaaacttaggaagtttgactttttaagatttcatggatcagtaagatcatgaagcatttgtctttttgtgcctggcttattttacttagccgtgtcttctaggttcctccaaattgttgcatattgcaggagttccttcttttgaggctgaattttttattgtgtatatataccacttttcctttttttgagacagagtctcactctgtcacccaggctggagtacagtgacatcatggcttattttggccttgacttcttggactcaagcaatcctcctgcctcagcctcccgagcagctgggaccacaggctacaacaccaagcctggctaatttttgtattttttatacagatagggtctcactatgttgcacgggttggtcttaaactcccgacctcaagcaatcatcctgcctcagcctcccaaagtgctgggattacagacgtgagccactgcgcccagctcacttttttttttttttgagttagagtcttgcttggtcgcccaagctggagtgcagtggcatgatctcggctcactgcaacctctgcctcccaggttcaaggcaattttcctgcctcagcctcccgagtagcagctgggactacaggtggccgccaccacacctggctaatttttgtatttttagtagagacggggtttcaccatgttggccaggctggtctcgaactcctgacctcatgatccgcctgtcttggcctcccaaagtgctgggattacaggtgtgagccactgtgcctggccacatattctttatattcatttgtggacactcgggctgattctatatcttggccattatgaataatgctacagtgaacataggggtatggatatctctttgacatactgatgtcattccctttgggtatatacccattagtgggattgctggatcatatggtatttctactttcaggtttttaggtgttttttttgtttgtttttttttttttttttttttgagacagggtctcagtctgccaccccagctggagtgcagtggcacgatgtcagctcactgcaacctctgtcagcctccaggttcaggtgattctcccacctcagcctcatgagtagctggggttacaggcgcatgtcacaatgcctggctaatttttgtattttttggggtagagatggtttcgccatgttggccaggctcgtctggaactcctgacctcaagtgatctgcctacctcggcctcccaaaatgctgggattacaggcgcgagccactgcacccagcctgacttgagcactttttcatgtatctgttggccatttgtatgtcttttgagaaatacctattcaggtgctttgtcaactttttaagtgggttgttttcttgctattgagcagttttgagtttcttatatatcttgaatattaaccccttatcagatgttgtttgcgagcattttctctgatgctgtaggttgtctcctaactttgtggtttcctttgctgtgcagaagcttttcagtttgatgtaatcttgtctacatttttgttgcctagctttagtttcgggttttaacagctaagtctttaattcattgtaagttgattttttaatatggtatgaaataaaagtctaattccgttcttcaacatgtggatatccagttttcccagcaccatttattaaaaagacattccttctcccattgttgtgctaattgttgagaatataaatatgaaaccccgagcttgtcttcttcctctgaaagctgtggaccgcacttcctttttcctgcccttatgctggtgacaccctgtcctgatatatgagaattagagtaaagcatttttttttgtttttttgagacgaggtctcttgcctaggctggagtgtagtggtgtgatcgtagctcactgcagcctccaactcctgagctcaagtgattgttccaccccagcctcccgagggcttgggcctacaactcctgctctcaagtgagccttctctcttggcctcccaaagtgctgggattacaggtgtgagccaccacaccgggcacttaaccatttttaggtgtacagttcagtagtaggaagtgcatagaacattcacattatttggcagccaatctccagaactcttcaatttgcaaaacaactcattaaggaactccctgttccccacttcccctctcctgtggcaaccgtcatcctactttctgactctgaattcatcatttgcttttttttttttcttccctctgcttcttcccacatagatactgatagtcttcagctctcccagcttttgatttttgattgtgctatctagttgctatttttatgtagcaattcaggaagatccaaaaactatgcttctatcattgcccccatctcttccattcacacttgaactcgccacaataaagctttcacacacttaaattgaaaactgcttttcgaagtcatgggtgacttccatgttgccacgtccatcgtccttactttacttgacctatcagaagcactggacactatgaactgtttaaactgcactgcaaaccttattcagatttcatacactcatccttactttttgaaagggattctctattgtagttatctttttcctcctcacattgtacaaggaatgtgggaggcagataacttgtctttttagttcttgggtccctgcacccacagagccatccctgtggagccttatccacacacagctggacctgatttacttcctaactccaccttctgggtcggccttcctttactatttgaaaaagcgtgattgggcctggcgtggtggctcatgcctgtaatcccaacattttgggaggctgacgcgggaggatcacttgaggctgggagttcaagaccagcctgggcaatatggtgaaaccccgtctctacaaaaaatacaaaaattaggcgggcttggtggcatgtgcctatagtcctagctactccagggaggcagaggttatagtgagttgtgattgtgccattgtgctccagcctgggcaacggaggagaccctatctcaacaacaaaaaccctgatttgcagccaaatagtttcctcagcctatttcctgccagtaaatggttaggagcccagtggctttgttttgaacagtctttgtccattttagtccaagctagtggtgcttgtgttagttcagttctcttaaaaacattgtgagttttctgtggattttactgggattcactgtgttagataaaaaccatctccaccaatctttttaagatacgctccctctctggggtgcatgtcagggtgctgtgtgagaacacacttgttctttcagaagcctgtttgtctaactaaccatgagggtttgagaagcaattccttacatctttctgggattttaacaaagggcctcatgttgaccagaggccacgttttacttgtggcatcgaaaccacctttgcataaattataactgagaggattatgacaatgaaagagatgtgacctaacttactgatttgttcctaacctccaagctgtccttgttcattcctgggtgtaggctgaactaattttggaaggaacttaacttacagtttaactttgttttttgttgttgttgtttattttgttttgttttgttttgagacagagtctcactctatcacccaggctggagtgcagtggccccatcttggctcactgcaatctccacctcctgggttcaaacgattctcctgcgtcagcctcctgagtagctgggactacaggtgcacgccaccacgccagactaatttttgtatttttagtagagacagggtttcaccatgttggccaggctggtctcgaactcctgatctcaaatgatctgcctgcctcggccttccaacgtgctgggattacaggtgtgagccaccacgcccggcctatagtttaactttgaaacaaagatggtaccagccctttccctgaacaaacacccttttagcctgggaactataaactgcctttgcaggactaacaaattagctacaagattagaaattgtggtttaggagtcatgcagctggaggtggcaagattctaaacccctccaaattgctcctccagataacaggtattttggagaccctgcactcgatggatcagctgtccctaaccagattgataaattggttcatctggtcttgtggcccccacccaggaactgactcagcaccagaggacagcttcaactccctgtgatttcatctctgacctaaccaatcagtagtccccactttctgaccccctgcccaccaaattatccttaaaaaccccatcccaagtctttagggagactgatttgcgtaataatacaactccagtctcccgtacagatgactgtgtgtggattaaactctttattgtaattcccctgtcttaaattgagtctgcctaggcagtgggcaaggaaaattcgttgggcggttacagcatcttagatttgttctttgcctccaagttttattttgattttagaacacgctgctaactgactcagacagtcttgggccctctatattcttctaaa

SEQ ID NO: 71 - DNA, 1361 bp, Homo sapiens
gctgatcttcgttcaagtgtgagctgcggctgagcccagcgctcgaggcgcgaggcagccaggagggcccgtgcggcgcggggagccagcgagcgcgccttcggcattggccgccgcgatgtcagctcagtgctgtgcgggccagctggcctgctgctgtgggtctgcaggctgctctctctgctgtgattgctgccccaggattcggcagtccctcagcacccgcttcatgtacgccctctacttcattctggtcgtcgtcctctgctgcatcatgatgtcaacaaccgtggctcacaagatgaaagagcaccctggcgctatgtgggagccgtcggaggcttcctcttcattggcatccagctcctcctgctcgtggagtttgcacataagtggaacaagaactggacagcaggcacagccagtaacaagctgtggtacgcctccctggccctggtgacgctcatcatgtattccattgccactggaggcttggttttgatggcagtgttttatacacagaaagacagctgcatggaaaacaaaattctgctgggagtaaatggaggcctgtgcctgcttatatcattggtagccatctcaccctgggtccaaaatcgacagccacactcggggctcttacaatcaggggtcataagctgctatgtcacctacctcaccttctcagctctgtccagcaaacctgcagaagtagttctagatgaacatgggaaaaatgttacaatctgtgtgcctgactttggtcaagacctgtacagagatgaaaacttggtgactatactggggaccagcctcttaatcggatgtatcttgtattcatgtttgacatcaacaacaagatcgagttctgacgctctgcaggggcgatacgcagctcctgaattggagatagctcgctgttgtttttgcttcagtcctggtggagaggacactgaagagcagcagccggggaaggagggaccacgggtcatttatgacgagaagaaaggcaccgtctacatctactcctacttccacttcgtgttcttcctagcttccctgtatgtgatgatgaccgtcaccaactggttcaactacgaaagtgccaacatcgagagcttcttcagcgggagctggtccatcttctgggtcaagatggcctcctgctggatatgcgtgctgttgtacctgtgtacgctggtcgctcccctctgctgccccacccgggagttctctgtgtgatgatatcggcggtcccctgggctttgtgggcctacagcctggaaagtgccatcttttgaacagtgtccccggggcagggactggcgccctgtgcctgagtgggtctgaaaaagctttga

SEQ ID NO: 72 - protein, 304 aa, Homo sapiens
WRYVGAVGGFLFIGIQLLLLVEFAHKWNKNWTAGTNKLWYASLALVTLIMYSIATGGLVLMAVFYTQKDSCMENKILLGVNGGLCLLISLVAISPWVQNRQPHSGLLQSGVISCYVTYLTFSALSSKPAEVVLDEHGKNVTICVPDFGQDLYRDENLVTILGTSLLIGCIKCLTSTTRSSSDALQGRYAAPELEIARCCFCFSPGGEDTEEQQPGKEGPRVIYDEKKGTVYIYSYFHFVFFLASLYVMMTVTNWFNYESANIESFFSGSWSIFWVKMASCWICVLLYLCTLVAPLCCPTREFSV

SEQ ID NO: 73 - DNA, 47438 bp, Mus musculus
  misc_feature (1)...(47438): n = A,T,C or G
ctggcctgagagacctggctgtcgctgcctccccggctcctccggcttcttcccgattcgcctcaggtcgctgtgcttgtatggaaagcactgattgactgagccatctcctcagcctgtgtggggactttttttttttttaatatttttaattttttaaaagatttatttatttatgtatacaaatacttggcatgtatgtctgcacaccagaaaatggcatcggacaatcatgagttgccttgtgggtgctgggaattgaactcaggatctttggaacagcagtgactgcttttatcattgagccatccctccagccctgtaaacagaggttatttatttctttattttattctaatataaactcgcattgttttgtgtgtgagttgcttaggatgctcttttcatcatttctaatttactttttttaaacattttaaaaaacatttatttattttatttatgggtccactgtagctgtcttcagacacaccagaagaaggcatcagatcccattacagatggttgtgagccaccatgtagttgctgggaattgaactcaggacctctggaagagcaagcagccagtgctcttaacggctgagccatctctccagccctttaatttacttttttaaaagaaaaggaagttgattttttttacccccaaaggttgaaagtcagttctggcttttcttttttcatggaagcagatatgattgagttctagttagtgaaggctaaactacaaatctgttggaggaagcagtgtgtggcgcgatgctggcaaagccttggtgctgacctcgcaggtcttccaggcctctgcagtcgcctcttcataatttctgatgacgtagcttgatatttccattaatagcaatgatcacatggattgttttgctcattttccacaagacccttgacagacagatgttcatttgataaaataaagccttgtgtgggtgcctgatctttatcaaaagtaaacgatagtgtgaacttttattcacttcaactctggaggcaacatagtagtgagtcagtcaagtggaagagtctagaggagaagcttggcatgccggagaggagagagtgaagcccgccttaacccttaacgggaatagaggaatagtctagtctgatgtgtccttttcagaattgcctgtaagtcttggctgatttatggcacccatggaagggaattgagcacagtagacttggaaggaagtgcgaacaggactgcagtatcaacatttactgtgtttgtatgcatgtctgtctgtctgtatgtctgtctgtctgtctgtctgaatgtctttatgcatgcaattagtttgagacaagctttgctgtgtactcctgctagcctgcaggttgctttatgtatcagcctgcctctgcttgtgaggaatcctcctgcctcagcttcccgggtgtgtgtggattttgtaggaactgggccatgaaacacaacttaagggggagggagtgaaaagatttctaatctgtgctgctgacccctcctgcccccaacacacactttgctttctttttcttttatctgagacatgctatcactgtctgcctagcctggaattcactgtgtagaccaggctggcctcatgatcctagtgatacatctgtctctgccttactggtgcaaggctcgggctatgtgccatcacccccccccccacacacacacacacacatttaactttgttatttcttatgttagacaagttttcttataaggttttcactatggggtaaacttaatagtcataagaaacagaaccaccttttttttttttttttcttattggaaaaacaaggaatttgctttttttctttttctttttttttttttttaaattcaggagtataatttagattattttactttctaaaaaaaaaaaattagccagacagtggtggcgcacgcctttaatcccagcacttgggaggcagaggcaggcggatttctgagttcgaggccagcctggtctacaaagtgagttccaggacaggcagagctacacggagaaaccctgtctcgaacaaaccaaaaaaataaataaataaattaaaataaaataaaataaaaaaattatttgtttacctattttgaggtgagatctctcactgtagccctgggaagctttaaactcagtaattcccctgccttagcctcccaagtgctggtattacaaacatatgctatcattcttgggctaaaaatttgttttaattgataaataagtgcatgtatttagagggtaccttgggacctgtagatagaatgatttattaagctaactacatatctgtaacttcatatacttatttatgggcagtgacatcgtttgggatgcctttgggagagtctaaagtatgttattattaaccatggccactctgctgtgactcgaggtgtaactcagggtgctaggtctcacagcctggcccttcctcattagcataggtatctttgattgacttctcctgtttgcttcccaaggtccctagcttttggtgagtttctactctttgagtgttaaactcttaacagttactacacagaagagacgccggggtgtgtttttcttcctatgctgagcttatctcacttagcatggcatccttctgggcctattcatgttattgcaaatggcagcattttcatttatttatttatttatttatttatttatttttattagatattttctttatgtacatttcaaatgctatcccgaaagtcccctataccctcctccccccccccccccaaccgccctgatcccctacccacccactcccacttcttggccctggcattcccctgtacggggcatataaagtttgcaataccaaggggcctctcttccctgtgttggccgactaggccatcttctgctacatatgcagctagagacatgagctctgggggtactggttagttcatattgttgttccacctatagggttgcagaccccttcagctccttgggtgctttctctagcttctccattgggggccctgtgttccatcttatagataactgtaggcatccacttctgtatttgccaggcactggcatagcctcatatgagacaactataccagggtcccttcagcaaaatcttgctggcatatgcaatagtgtctgggtttggtggctgattatgggatgtatccccgggtggggtattctctggatagtccatcctttcgtcttagctctaaactttgtctctgtaactcctttcatgggtgttttgttccctattctaaggaggaatgaagtatccacccgttggtcttccctcttcctgattttcttgtgttttgcaaattgtatcttgggtgttctatgtttctgggctaatatctacttatcaatgagtgcatatctaatgacttcttttgtgattgggttacctcactaaggatgatatcctccagatacatccatttgtccaaatttcataaatccattgtttttaatagcttagtagtactccattgtgtaaatgtaccacattttctgtatccattcttctattgagggacatctgggttcttttcagcttctggctattataaataaggctgctatgaacatagtggagcatgtgttcttattaccagttagaacaacttctgggtatatgaaatggcagcattttcaaaaagatatgtgtagttcctgaaatgcgctcataaaacagaagttacagaccctgtcttagaagataaactactcatcagttagaaggataaaatatgaatgccatctgcactcttaaatattcagtcatccatgcaaatagcaagatttcttggcttaatggaggtagttatcttaagacatgtgtagactgtcactgataatattgcttattatgggatgctttggcgtgatttgaataattatggcactagactaaagatccattgattcaaaatgggatacaggcaataggcattcctcttaaacgccccttgagctccttcattgtatttctatctttaaaacggtttgcaaaaccacttggatatttagaatggatgtgtttagatggaatgttttcatgaatttgatttttttcccttgtttcagatttagtggagttcaatttgggcagtcccaagaatgtcggtcccttccttgcagtggaccagaaacacaacgtcttgctcagctatcgctgtcatggtccacccattcgcttcacgagcgtctttagtaatgagctccattacgtggcaaatgaactgaacaggctcgtgggagggaagaacacagtggtggccatagccgtatggtctcactttagcacgttccccttggaagtctacatccggaggctcaggaacatcaggcgggcagtggtccaactcctggaccgaagtcctaagacagtggttgtcatccggacaggcaatgcccaagagctggggcctgaggtgagcctttacaacagtgactggtacaactttcagctggacactgtccttcggaggatgttttcaggggtcggagtctaccttgttgatgcctgggagatgaccttggctcatcacctaccccacaaactgcatccagatgaagtgatcgtgaagaaccagctggacatgttcttatcttacgtatgccccttggagacctagctgtcctcaaggacactggagcaatcacgtccagtgacctttccaattgacctgcagcatagataatctgtgatcgactccattgcgaaatggatactcccaatcggtttgccattcagaaaagagctgtcctttgcataatgactggtaatgaacgtaggcagtgtaggctgcgtttgtagctacctataggatttttccgtctcgacttagccatcctagagatctaacttattgcatctgcacacggtattgctgcccttgtaaccaaagatgctaatgagtggttaagaactggcttctcgggggtgagggtgggggtgggggtgggggtgacatgctgatgccatttaagagatgctttgatgtaaacagaagggatagatttggttggcagtgctatgtttgccacttactcgataaagggcatttgaacaggtcttcatgaatgtgccctcctcaggaatagagagggattcttgctagaggttcctgtggccacaatgaagactgttgtatctcaggagtttctattgacttatttatttattttctcaatcacttgtaaaggccaatgtgtgtggtcagaattttatatgaggatattatcaagttcctgcttttatctcaaaagacgtccaacgaaagagcacccagtctctgctttggattggtatgggcactggagaactatttcttacttgattcagctgagttttatgtgatgaattcttactctggaatagccacttttggaagcgactgtgtaaatagaagtttatttttatgtcccgaagcttgtgggttttaagaactgactcttatgttaagaatgctgctcactctcagaaagttgtcagggtttctgccctcagcagttccagctgtttcccctttgctttttggctgtcatgaaatatatgccgaaatcagacgtgaaaccagatcagaagttaataaaattagatattaaaactcatgacaagtatttcttgacttgggcataaagtctgcatacccattgtctgtctcatgcttgcatgtaaggagccactattgagctatctgctatttcttctggctttttggactgtggttcaagtctagggccttgcacacactaggaagctgtgtctaccaactgaattacattcctagcccatttctggatacccccaagatacaaagattggtcattttattggacgttgtcttattaatattaagtggttttaaattaaatttaggatcatctaataagtagtttttgcattgtgagaggttataagttacttctgctttctttgaacagacctgcataaacactgggctgccttgggaaatgaagacagatgctaaagcaagaaaaatacacatccttcagaaatgaatagtttgggcttttaatgcaaaggacttaagttgaccctttccttctcttgggggccgttaagtttataaactattttgttttaagtgtataaaatataattgcttttggcgtttaggaccagtgaagttaaatgtattatgctagcttagtttttgcaatactgaagcttgatctttgtgggacactgtgctagatacggagtggaccactgagctaaacctccagcccatctgtctgtccgtccgtccttccttccttttgtcttttaaacttttagaattttaagagaaggtctccaaaagttcatagactggtcttgactttgcctacacaggctttaaattttcttccttcctaccttagcctctccagtaactggacctataaggctgtgcaatcagcctggttaaatagctcattttaagtcaggtgtggtggcacacacctttaataacagcacttgggaggctgagacaggtgggtctctgtgtttgaggctagcttggtctacagactgagttccaggacagccagggcgacacagagaaaccccgtctcgaaaaacaaaacaaaaacaaacaaaaaagctcattttaaatggccttaagtttgcagtatttgataaaaacgagttagggaccatacctccagggattatagaattaatcaccttcgtgacaaatggccaagagattctagtgcagtcgtagggctccacactttgagaaacagtgacaaaggaaagattgatctagagaagtaacattgcttatctattacttcaaggcgttatcaagcgcttaacgctggccgtgatttgatagtttaggtgatactagtcccattcctgtaccggaaggactcaagtcagaattgaactcaggtacacagagtctgtgccctgcctggctacaactgctttggcttgtgtaaggatgtgctgggctttgagacctcctcaacccttccgtgggaggcagaatcagaagagtttctttcccagtgaaatttcaagcaccgctcaccattggttcacagcgattggtctccatggctgatgccttgtgacctttttcagtatttgcctttcagcttggttgcacaaggtcttgacaatttgatagcacggtctcctgaagtcctttcagtcacctttatctctctttggccttttacactccggtgtggaaatttttatagaagctaaaatattacttaaatatgtcccagagcagttagacgcaggttgagcatctctaatctgaaaaccccaactccccccaaatctaaacttttttgagtacttgacatcacaggtaagaaaagcttcacctcacattacaggatgggtcgcactcccaagacagctgtggggatggggagatggctcagagtccagtttccagaggaccgagtctgaatcccagcctccaagccaagtggcttacagacgaccagtaactgacactctagatgggtccagagcctcagtgtgcctgcatccttgtggcattcgttcacactgacacgcagaaacacacaaagagtaaaggccaggtgtggcatatgctttcaatcccaggacttgggaggtagaggcaggcagatctctgtggactcaaggccagccttgtttgtatagttctatactaaccaagagttacttggtgagacactgtcttaaaacaaaacaaaacacccaaatacatgcaatgaggataaaaaaaaccttaaaaatatttttcagaagccagacatactaaatgttatataacattttcttcagtttatatatgtaaagtatatataaggcatacatttcctacttaggcttgttatgcattaatgagttatatacatatatgtgcatgtgaatctatacacgtatacatacatacacacatgtacacacatgcatatatatgtatgtatacacacatgcatatatatgtatgtatacacacacatatatatgtatacacatacatatacatacataaatattcctgagtctaaaataatttaaaatcttacagttctggactcatggacttcagacaagggcttctgaaacttatgaaaaatttattatagattagttagtcccatatacttgtgaatgtcagcatgccagataaaagtgtttaaatacatatttcttataataaataaaaagggaatcataattaaaaaaactacacaggtttaattaaggatacagtctagctgagtacaatgaatattagcattttgataggctttctttctgtttttttttttctttttctttttaagcatatgcaactgatcctctttatctctaggctccatatcactggcttcagtcaacttccgatacaaacatttgggaatgtattgcacctgtactaaacatgtacagacttttaatatatcattgttctctatgtaataataatgaagtataacatccacttacataacatttacatattatcaaatatactaagtagcctagaaatgatttcagatatatgggaggatgttgcttcttatacccaaatactgtgccatttttctataatggagttgagcatccctagattataatataattaatcctagcacccaaattgttggagttagaatcatagaggacatgtaatttgggcctttaaaaaattgaacctacagtttaaatatttttatatgttacatagccttaataattataaaggtctgcctaaaattgtactatctagtaatagttttactatgtcagttggccattatggttggatgtttgggcttgtaacaaaatattaaaatagatttacatacatttttgttgaaataaagtatgagtttgtggggctggagaaatgggacagctgttaagagcagcaacttctcttctgtttcctctttcaaagtgagtggggagtacctgagtacagggggcacttgggaatcctggggtagatggcaggtggtagaggaccagagagctattgaggcagaagtttcagacacagaaactagggtttctttaaaatcttataataattttaaaaattaaatggcattttaaatacagatttttaagcatgaagattaagagaaaaagaagtgctcaagaaaaaggggtcaaacctggccttctctgagagagaattgccagaaactcattttaggatatttaccctttaaaatattctatccgagatgcattacacacatacagaatttccattattattattattattattattattattattattattattattattaatcaaacgagaggtagtcaggtctcttgagctttagggatctgaactgatgatgtagatgaacacaatattcttgctgccccaataggacagcgggtgtttcctacgtaatcacaaaactagactgtgacaacgaatgcctggacatgatgaaagaagagaagaaaaaacggttctgaaatcactgtaatgagggttccaaaactgagcagcgaaactgcatgctgtcaggagaaaccccttcagtgttgtgcaatggcaggcagataggaccactttcccatcacttttgcctgcagtcattcagttaaggagccctgcttcatttatggtggcagattaggaatacacaacagagatgccgctttgccatgctcaccaaactcaaccgggggaagtaatcctccagtaatcctccagaccggtttccaggcctttgaggtcacaatgaaaacatgacagtccctgaggcgactctaacgaggagccataatcccctagattcccgggacactgggacaggagtcctgaaaacagctctgcggggcctcagtcctccgcgcggctccagtccgggtcttggggaccgccctggcggggaatgtccgggactcgggtcggtgtctttttggcctgggaatttccagcgtgtggaaaaagtccacaaacttagtcctcgctgcccgcctcgcctcctccggcccttctcggtgcccacgcacccccgatcgaacccgaggatgagcatagggtgtattttaggcgtgctgggcttccccgccccctctgcccacttagctggcaaaaagaaagccagccctataaaggaggccagggccaaggactggcctcctcccgccacgaggtcagacggcgagctctagagaaagaggctgcttaactgttctttatcatgtaacctcaaaaggaaacccagccgtcttctgatgctctcacgtacttgggggcattgtcgctgcttacagctgaaagcagttgaattgcttttacgtatttgtgtgactcgaatcttcaaatacaaaggtatacttttattatttgatgttcaatatgaaaagggatctaaagagctaagctgccctcaacccgttcctttcccatgctctttccttgggagctagatgtctgctgatttataaagtagtaacatttgctttgtggcaaaatattgtggggcagtggtttgtttgttgttttggggatgcaggatgctatgatatcttggcaatagcttgagttgtatctgttgcctataaaggcccaggaagaattaggataccagtggagggtacatgtggtggctgatgaagatgcttgactttgtatatctgatgtatgaatttaccttaagctggtgatggaaaatggtggctaccctaaggtggaagttttccgggaggtttgatgggtgggtttaaaggcttactttctcataaaggtaaacatgaagctacaggttttgttttgtgtatgtcttttttgtttgtttgttttgttttgtttttgacagggtttctctgtgtagcctgggctgttctggaactcactctgtagatcagagttgcctcgaactcatatatcctcctgcttctacctcctgagtgctggaattaacggcatgcaccgccacacttggctttatgaaactgcctcttgccgggtggtggtgacacacgcctttagtcccagcagttgggaggcagaggcgggcagatttctgagttcgaggccagtctggtctacagagtgtgttccaggacagccagggctatacagagaaatcctgtctcgaaaaaccaaaccaaaccaaaccaaaccaaaccaaaccaaaccaaaccaaaccaaaccccccaaacaacaacaaaacaaacaaaactgcctctttgtggaaaaatatattttgagtaggttgaagtatttgatagcatatcctaggtagttctcatatcacctctataaaactaaaatttatgaatggccgttttatgaattagagaaaccattgagctggggatggcttggcagaacctatagcttcataaaagtttaagagatttgtccatgtgaatgcatgtttctagatgggatggattagaggttctctatgctgccagccctagtgaactgactgtatcaagcaaaggggctggcccagagaggatgtgacatttattatgtaaattttaagaacttggcattacactcttaatttgaatctggcctctaaagaaataagtacctggtcgggtggaatggtttgtttgtttgtttgtttgtttgtttctcttagtataatagttctctacctgtgggtggcaactccttaggaggggttgaatgaccttattgaaggggtcacttatcagatatttgacatatcagatatttacattaccattcaaaacagtaacaaaatgacagttatagagtagcaacaaaaataatgttatggtccagggtcaccacaacatgaggaagtgaactaaagggtcacagtattaggagcgttgagagccactgttggacaataggttgtctggataacaaaatagaaaaaaatgtccagcgcccatttactgcagtagttatccctgatacagaaaagcttaagcaacatctcatggaaacatgtttttatttgacttgagaatacaatgtgttttctactccctccagcacctctctatcattttgcaggttagggacacagctggtcagggtacaggtgacaagccctgaagagacagaagtcaatctaggatgagtccccgtaggaagtcagtgcacaatcatgcacttggtggcgttctgcctagggtacaggcaatgccagggtcagcataactgctattaagatactgatccttttggcttatgaaggaaaaggggacaaacctgtccctttctttcctttgtcctgacaaagatacacagacagtaaccttcccagaagctgcagtctccttggaccctgatctccagggatgctttctgattgttcagagaccacgtactaatcactcctgaagactgtttccttttggctatggactgacactgatctggtggcctcttgctctcttgccctcagcttaccaagaagatcctgaggcccatgctgaacttcgccttttgatgttggctcgatgctgaagtcccgagggtaagtgggtgaatgtttctaagtgggatctaagcattccttctgtcttgggtggtattgtcagtatgggaaatggatgttttattcggagagttctaaggtttgcaaagctcttaatttaaccaatttttgaagtttacttacaagcagttaattatgacttatgaactaaaagtttttggtgttttttttttttaacaaatatttgaatttcctctgtttttatgggaggaggccatgaacacatctaagaggggaatccagccctcagctgactgacagtttcagaattatgaaatctttcacaggctcagagagcatcacatctgaatggtgggtgggtgaagaaactcatttgagctcacatctgtggtttctgatcaaagcactttctgttccttcagtttggaactgtgagccccacccccacccccacccccaccccaagtgtctcatggagcaaatactggacttgactatttgtaaacacttgttttaggagctgaacttgcaagagctcagctttccctcacattaccatttgaggtacagtgtactcagctatatttcctagacccaggagaactgagctgttggctcagagtctcccagatagaattcagaacctagatttgccaccaggccagtgacacgaaggtaccaataggagcaggcagctttccccccaagaactcttctacttctttgctgagtcttggctaccacatactctctgttcatagttaactgatgcagtccttattgataaccaccatgataattcacatatgaaggagaccacagggaagtgttttatacctcagagagtggagccacaggagggtggctgcctgccctcaggagttgataagagctggccatttactttctgtgttctttttggaaacagtaacagagattgtagagtaggtatcctgtcaccaatttccttttgcccctctcaggaccttttcttctcgaacgctgggaggacattccgcctcccccagtacagcatccattgctgatccctatgaggaagggagccttgggtagccccacccatgtgtctgcagcatccctgatgtttcagagggagctaataagctgactgagtgatctgtttttataggtagcctccatgaggctatatagaagaacatttacatattgggttattttgcagaaatgtctcacagactgcagactgcactccctccagactcagtgctatcacttaagtgggagggatgaacgagtctacttggatagctaagaacacaatgcatggcgtaatttacgaccactctcagtccctctggttattttggttaagtttggcatcttgaatagcacccgtggagaggggttcaggctatactgtgtgcattttccacttggatagcatcaccagagagagcaaatattgtttctttttgtgaccttttgggccttcttaagggaaaaaccttcagttgttacaatgggcatcctctgtttgccctgcaggcagccagggcgtgcagatgctccatcagatcatctgcagtattaaacgctcatgaggggtgttcaggaaaggaatgtgtaaggaactctctatagggcacgcaggagtacaaaaacaacagcaagatgccccgctgtaaatggtctatgtgcttactcacgtgacattggcgacttttctctggttgcttgtctctttgtactctcttctgtctccatcttttgtcaagagttttaaaagtactggctgccaaggacggaactgtttcgattctttttctgctcaaggggagttttcttgctgtctatctttaaatatttcaaaatgtctaaaaaattatggtaaaattacacacgacatccaagtgatgagctttatgctgggagcctgcgctgacaagtatctctttgctttaagtgtttctggctggatacccacaatccaaattgccagatcacgtggtaatcttgtgtagaactcttgaagctaatttgaatgattatttttttttcccctttggtttttttcgagacagggtttcctctgtgtagcccctggctgtcctggaactcactctgtagaccaggctggcctcgaactcagaaatctgcctgcctctgcctcccgagtgctgggattaaaggcatgcaccactactgcccggccttaaatgattattattgtctaagtgtgcgcatgctacagtggaagccagatgacaacattcagaggacagctctctcccctttcactatgagttttggagatttgaactcactgaagcaagtgatttacccactgagacatttttctgggtctgtgtataacttgttaaagctttgccatatctatcagttttcaaagtgcctatgccatgatcattttcttctttaaattttttataacatatatatatatatatatatatatatatatacatatatatatgtatataacatatatgtgtatatatacacacttgtgtgtgtgtgtgtgtgtgtgtgtgtgtgtgtgtgtgtgtgtgagtctgagggcaccctgtaggctctggggttctccttctaccatgtgggttctggggctccaaatgatgtccttagacttggtggcaagcacctttgcacacagagctgtctggccagccctgcctatttcttcttaactcattttgcagtgtttgactgggtggagtgaatcagtagttaatgcgcatcgtgagtgtaagtcaacgattgataactgagttaagaatagagactctgcccagtaattctgcattcagcaccacaatgattgagacagaaaaccttcctcaaagtctacccgcactgtagaaccaagtggatggctggaaattgttccaatgaaaaccactgggctaatgtgctggattccacgtacactggatccttttaaacatttggaccgcttgtcaccagaacactaagttcaaaagaaatcctgggaggtttcccagagatttaaaggggccagagctacagggcaactcatggatgcaagtggcaagacctgtgtctacaggtgaatggagagaacccagagtgtgggaattgggtgtctctgacttcacccccacctcctttctttacaccccccccatttcctcatttacacattcataacacagagatggtccacgagtttttctctcatgaattctccataattcgagaaacagtgaaaatggctcattttctagttagaatagctgcccatggccagctctcagcaacctgtaatggctttttggtttttacttctgctaagggcaaagaaggtgggttcaatatgagatgggagacaagggttagaggaatctgaaaatccagttttctgggccaggctgctgaactgacccttgaaatcgctattgtcatgtcagatcaaacttgatcgcagaggcggggttggaccagggccttctaggcctgtcatcctgtgccaaactttgatagctcttcaacaaccaaggaaaatttttttttttttacttgtggcgttgaacagaatccagaattaagataagagagattcttacacgcaacgctaattaaatatctagggcacagtgacagattacagttggcttgtaacgcaggaggtaccatgtggtagcaacattcacggggccactttcaatatactgtttgtctaagctccaaagtttttggtagcccaaaatttgtgcatataaggtgaagttattgaagaagacacccctccactcaaataaataattagacagacaaaaaaaataattgaaaattttggaaaatatttctcctgctcaactgctggttccactgacagaatccagattaaaccaattccaaagcctggtttcacatcctctaaggtatggtcctatcaaatctactggtccagctatggattcagccttttgtaaaagttcccgtgtaggctgcgtgagctgactgtgagaggccttcttgaaattggtgggacagtgactgctctgatccattgcagagaagaggtgagatgcaggccagaggcagaacaggaagcaaaaataaaatacggtggcttccttatttctgtccgtggtacactatcagccttgatggggcctgactctgtctgttctgcgttattcagtccattatcagccctatggattgcacctctggttcacttccctgaagagcatcctctttccagttctgtgggtactagcccagttcatggctctgactgttacagtgtcccacttacctacctgcgctcagctgctacttctgttgttcccactttgctcagaaattctgaatggctccccatggcttatcacaccaacttttcaccgttttcatcgagccgaagccccgtgggaagggactccgaacctgatttcaagattgtccccttttcttaggttttcttcaagttgggccggtgagccaaagacatcagaatatttaactatcaagtattaaacacagatttgaaaaataataataatgacaaaaaacatcattggtgtgctaagcatatcatatatactacctcatttaacagatacactgaccaaaagtagttgaatatccattttaaggatgagaaaagtagtcctgagggcacaagtaatggtagtggttaataagtgactggatgggatttggaccaaagtctgctttactcgaaaaccctatgatttcaaccaaaggttgaaaaatattacaggcaagaactttagcttggataaaagcttgtagcaagaatcaatgtgccattgtctaatgtgtatcatgaggatataaatatactggaattggggattagttgccagagctgttacagtgaagcattcccagacttagctgttcaaacaaacagaaatttagtgttccacagaaggtcatttggtaaaatgcttgctacataacaatgcagacccaagtttggtctccagaatccatcttaaaaaaatgccaggcatggccgtcatgattataatcctatcacgaagaggcagggacagtggtccatggggcttgctggtcaactagcctagtccactctgtgagctctaggccaaagagagatccttttacaacacaacacaacacaacacaacacaacacaacacaaacccaggtgtatggtgcctgagatatgacacccaagacttatacactggcctccactcatactgcatacataggtacacttatacatgcacacacacatacacatcccccaaaaacaaaaacaaaaacagcaatgacaacaaaacccgaccaaccaaccaaccaaccaaccaaccaacgaaaacaaaatcccataggttcattcccacactgttctggaaacaggaagtccagagttaggctcagcaagtttgacttgtcttgaggcttgtttaacttgtcctgaggcttctttgctcaagtgctcatggaaccttctccatatgtgtgcacagggcccctgcccagggcctttggtttgtgcacatccctggtgccttttaagacaccctttacattaactgggatagggctcctttggacctcacttcatctcatctctgcaaaggcctgtctccaaatatagtcttagtttgaagtcccaccctgtagggcatcgacatagggattctgtgtcgatggggaggcagttcagactgtaacggaatcgatagctggtttggtaggcccaccctttagaagatgtagaatcaggcttagggattggtttcatctagacactgtcattgggtctggcagctgagtgggagaactgccttccaaaacttccagctagttttgtctgtctggtcatttgcttgtgaggacaggggtcgtcatcaaccacttctccaccttatatattgacggttcagtaggggtcactcacttaacctggagcacagcaattcagctagcctggctagtcagacagcccccaggagtctttgcctcctatgctgggattatagacttctatgccatgcacttacattttacagtggtgctggggacctgaattcacacaccttacacttgcatacaattcacttcaaccactgacccatctccacatcctctctagttggtattattattattattattattattattattaattatattttaaaagttgcagttatttatttctgtactgtgcatgtatgtatgtgtgagagtgtgggcgtgtgtgtgctatggtgtgtgtgtcagaagacaactttcgagggctgccctgcccttttacatgtgggtcctgagattgaattcgtgccttcagggttgaccgttaagtgcctgtttaccttctgagccgtttcctgcgtcatccagctgaatgagtacaaagggttgcatagggaccactttggagaaagaactactagaactttcttatagtgaaatggaggagagaaagcatcagacctttaagttgtttagactttcctgcaaaggtggggtgtgtacggtgaatgcatttggatatgcgggtgcatgctcgcatgtgcagaggccagagtaggactcctggtgtcttcctttggatgtctgctgttcagccttgagtcagggtttctctgtcaatccgaacttgccttttctgctaggctggctattgacagctctcagcatgcacctgtcttcacctctcaaagccagggctgcagacacatgcagctggacctgacgttgtacatgagtgctacagatttgcactcagggttttgtacttggaacaaaaagttctctcagtcaaccagaccatctccataggtcatgaagagagtcgtttggtgggtatattggtgcaaagagggaaaatgagttgggtcatctccctccctccctccctgccttccttcccccctttctctctttctttccctctttcttttgtatgcctatatgtacatgtttgtgggtgcacgcacatatatgtgaggtgtgcattgtggtgtgtgcatatggaaacttggggacaggcttgggtatcctacctcaggtgccgtccatctttgtgtgtctttctatgtgtggtctatacatgcttgtgtgcatgtgtgtacacacatgtgtgctaccacacttggtatttccttacatatgttctaggggtggcactaagttcctcctgtctataccgcctgcggcatctcccagaggttaggtctcagacctgtcagtcacacttgtggcagcatgggatatgggatttgaattcagaggtcaggccagcccgagcagccggaggcttcacttgggtgagagctgagcttgggggtgatatttaaagttcaggaagagtgaaattaaaaaaaaaatctcaggtctggtgcacactattaatcccagcacctgggaggcagaggcaggggaatctctgagttcaagactaggctggtctgcagagtgagactgcctctgataaaactgaacaaacaacaaaaatccaacccaaagcagaagtctcaggtgtcaaagtgttctgtgtggaaagtggtaggaagacttccccgtccatctgaaatggaacttctggctttctttacctgatgcctggcacatcagaccactcgcccttcattatgcagcagttcgattgttgtctgtccctgctgtgaatgtcagctccacaagagactgcatttctgtccagtgctgttcagcacaccacccggaagggtgtccagattgctatacctgctccttaagcagttactgaatgaatcagtgaatacgtgcgattctgtgactaatggaatctagattggtttaagttggttatagtccagatattgcctttttgtttcctgcagaaggtttttttttttttttcctttaacaaatcctgtttgataaatgaacactgacacaaatcaaaaagactcagcatgaagtattggccttgtttctgcttgcattttcccaatttgtgccttctcctgactaagatcagtggtgccctcctcagctactgtgcctaagaaactagatgtgtctctgtcttaaaatccaggcttttctggttacccctagattatctctttgcatctatctttttgttgttatttgtcgagttttgggtttctgctagctctctttcccctttactggatgaacttaggctcttatctcattgtagctgtgaatatcagagctccatttacaaataacaagtatgcctgtcacccttgtctacacgtttctacagtaatgttgctgctatggaatagggccatggagttgtcatgaaatacaaccataggttggttaggcatttaaaccaattccattctctcccaaggaaccacacaaggtacatctgagactatttttgaattctcttattattacacgcctcctctttcagcagcctgaatcatgtaagtgacattggaattattgggtgaaggaatttaaatgagggtgctctaacagatagggaattcctttgttgggggtgggggcgctattgaaatcaccggggaattgtaccaggtgccccacaccagtgtgaagatcgtatgtggcacagaacaccagttggtaagagttatacccatctggaaacttggggaaatggctgagagtcactgagaatctcaaggattctgatgagacattggacttataaaactaaagccaaaaacaaaacccaacaaaaccaaaccaaaactaaacaccttgtttccatccttagttctttctgcagaatctttttttttttcatcactctccctgccacttcagactctttgttgggtttctctggaactctatcctgtattggttgatgtaggtggatgggagaggttgccctgcaggtaatgggacaggcctgtaagatctagaatgagtttcaggagctgggatttgacctgatgtttggaaacagggaagatggaagaatgttgagaggagccctgatttgctgactcattgctgattggcgcatcttcaggaattgctcattctaagttttctaacgtattaattcaacagtacaatattttaaatgatatctggctcctttttaaaaaatattttttattaggtattttccttatttacatttacaatgctatcccaaaagtcccccataccctcccccccactcccctacccacccactcccactttttggccctggcgttcccctgtactggggcatataaagtttgcaagtccaatgggcctctctttccagtgatggccgactaggccatcttttgatgcatatgctgctagagtcaagagctccggggtactggttagttcataatgttgttccacctatagggttgcagatccctttagctccttgggtactttctctagctcctccattgggagccctgagattcatccaatagctgactgtgagcatccacttctgtgtttgctaggccctggcatagtctcacaagagacaactatatctgggtcctttcagcaaaatcttgctagtgtatgcaatggtgtcagcgtttagaagctgattatgggatggatcctggatatggcagtctctagatggtccatccttttgtcacagctccaaactttgtctctgtaactccttccatgggtgttttgttcccaattctaagaagaggcaaagtgtgcacactttggtcttcgttcttcttgagtttcatgcgtttagcaaattgtatcttatatcttgggtatcctaagtttctgggctaatatctacttattagtgagtacatattgtgtgagttcctttgtgattgggttacctcactcaggaagatgccctccaggtccatccatttgcctaggaatttcataaattcattctttttaatagctgagtagtactccattgtgtaaatgtaccacattttctgtatccattcctctgttgaggggcatctgggttctttccagcttctggctattataaatgaggctgctatgaacatagtggagcatgcatccttcttaccaattggaacatcttctggatatatgcccaggagaggtattgcgggatcctccggtagtactatgtccaattttctgaggaaccggatatctggctcctttttcaccagtttaatgacacaaatgtgaaagtgtgtgcatgtgtgtgtgtgtgtgtgtgtgtgtgtgtatgtgtgtgctatacagaaacaagctatgactgagctacattctgagaccccagctaacttttatgttttgattcattaaatccattggtctggcttgaactttaatagttcttttacccatagttgatttttcttaatgtcttgcattgttcatctggaacatatagttaattgagtgatgtaggttctctaatgctttatcacgggtataacgatatacacacatgtatgtttcattaatttaaaaattatatttgtggataacctcatactggcctcatcacagaagtctttatgtaccaatcagggggctatccagctcaggtgacctgacagaaattgcctcaaagtttactttttcattaaaaaccttaaattctttcattgtcaacaaatactgatagctattcttcttgagagagcagatttactttgtaattaaaaagaaatcagaatatctaggttgcctttcacatgaaattggtattttctgacagtggctcagcttacagcccagtgtttgattagaacaaatagcaacccctactccaccctggtgagcaaagtacgattttgtttttcaaagcactcttttttttttcttttaaagctttattcatctattttatgtatatgagtacaccatcgctctcttcagacacaccagaagagggcatcaaaccccgttgcagatggttgtaagctgggaattgaactcagagatctctggaagagcagtcagtgttcttaaccactgagccatctctgcagcccaaagcactctccttaaagacaattatcgtacctcaaggtactgcacaaacatctatgtatgtctcttcacacagaaaattaatgtgatattaatgtaatatttcagggatcagtatgaataaaatttagaatcatgattctgtctaagacgtccttgagtgaaacatacgattttgttcccctagccttaagttaagattcaaaacggtgagtgtacatttcagatgtctcaacgccagctgcatctgtagttacacactcctgtaatctgctggactgatatcaggcgagggagaccaagtagcaggagcagtctgtagaactgtcctctcaggtggaagcagaattcttcacaagagctgcttgctgaggtgcccggtcatttgaaagtggcagtgcagtcatcccccccccccccatttccctccccttcctgtcagcaaatcaatgagcagccattcctgccttcttgcctgcttacttctgccaatacagtatagtagctcaccctcttagatactggtgtctccatttcaaataggaaatgctgttctaaactatttacggtattaagaaagttcattacatttacacttaaagaattctgttccatttttagagctctgacaatggtgttacaacattacctgtaccataaaacagttcaaactgttcagccgtatgaaacacaataaagtaaattattaacacctgtactgccagggtgtcttcaggtcactttggaagagatttctcctttccacgagtcacagagttctaggatacattattttcatcttttccattgtccttagatgcagacggtgtgcatctgagcctaaaaggccacaagtcgtctcatctttatctttagaacagcgtcagacccacgttagacaaatgagggttttaatcactgtgacagttcacgtgtgtgtggtgtgtgtgtgtagtttgcgaatgtgtgtagagaggagacaaagatctgaaaggagggtagagagaagacgatggaagcagagggttaaaacgtgtgttctagaaggttatctaactggtggggacagggagcagctagtgggggaaggagatgagttggggaaggaacagatcataatgacaaatacatataaaaatgccacagtggcacgcattggttttggtatgctaacttaaaagttaatcacacagaaaaggaggcaactttattcaagagcccttaattgggccattgaaacagtggggggtgggaagaactgcaggatgtctgctagcggccctcgtgggccaggcagtctgcttctagtataagccagaaaagaagtgtttgtactagtcacctatgaccttcaggcgaaggaagggctgtatttacaccaatcacaacagtgttccatctgcagcagttgcagcagtctctcctagactaccaccaggggacaggccttcaatctggccggagtgggaagggttcctgggtgggggtgggggtgggggagaagtgtggctctgaggctgcatcttcagaagctggagtagtgttttagaagctacagccgccatgtagctctctggagtgttgaatgtggtttgacagttcttttctctcaaggctgcctgcgcacagaacaagagcctaacagctaacaattaggggaatcaaatcccctcacctccccatatttgtttatttccagaaaacaagcagctgtgcgaacggcaaggcgtcattgatattaattttagctgtgcttttagtcatgctccacacctgcctagccctgtagcacctgtgggctgcctgctgcttacccccgtcagcaatgctagatttgtggattctgcctagcagagccatttacttacgtaatgatctagttatttctacttacctctttgccactatctcttcttctaggtcactttttttttccttcttcttaggccactaggactcccctcagtctcatcttctctaaaactgtttcatttctgccagcttcagattccctcacgttaaagttctagtaacttcgctggtccctgtaggtgctccgctcaggttacctttcacatttatgctattttccctttggcagtcctaaaaggcactgcggattcttccctgactcctggccttaattcttggcagatgattttcctgcaaacgctttagggccatcctttagggctcatctcattctttgcgaagacttcccccttctccccctctccacaagaaagtctctttttaggctgttcactgaactttgtacctctcacgatgtttaatcatagtcagtttcttttcatcggtgtgtgtataccttatccccacgtgttaagatgttacttgaaaatttagacttaatcattcattctttctctcccttaaaaataaacttcccttgacggttcgctagttggatttgcggcggaagtataaacattgaaaaaagtattcaaggtagaggcatcaaaatccctgtgtttatcaggactaggtcaagttgtgcagaataaaacgttacataatacgtaaaaaataatataaaacatacaaagaatatacacgcatatatgcgtattcatcattttgctagaagcttttttctagtattgaaggatacgaaagggtagtcattgctgtttattctaatactgtactaaaaaaaaaaaaaagattgcttatggcccagatatgaagttagagaaactgcaagagctctgaaattgagtccaggccagaaagtccgcgggcaaccgcttccaggtttggaggcgggctaaatgttggaggcaagggaggagactgaactctgcacgcaccgctctggcttcccactccccgaactgggcggacctgttcttgcagcagcccggggctcccgctcgcccccgggcatcgcagcccctgcgcagacagcggttgccgcggaccccgggcccctggggatgcggtgcgtccagcgaaggccaaccggggaaacttggagctggccccgacgggggttcggggcgcgggtgctagccggggtttccaggtgagccgccggaaaacaaccggtcggcccgggcggggcggggcgagggcggagggcacattgcctcatcccgggcattttactggaaactagacacatccggaggcggggcgggaggcagcccaggcgccgcctcaccgggcggagcgcggaggaggaggtcagttcatttaaatagcccggtcccctccgggcgcgcacgtactagtcgctctgccgcagccaaccgcgtagccatccggtggcgcaggtgtctggggaccccgagcgcctagcctgggagcatgatcgtggacaagctgctggacgacagccgcggcggagaggggctgctggacgcggccggcgactgcggcctcatgaccagcccgctcaacctggcttacttctacggcgcctcgcctccttccgcccccggcgccggcgacaccggctacctgtccgccgtgccctccgcgcccggctcgcccggctccgactcctccgatttctcctccacttcctccgtgtcctcctgcggggccgtggagtcccgtcccagaggtggcgcccgcgccgagcgccctcaaggtacccacccgcgagattccttgcccctctattcggggttcacacgnnnnnnnnnnnnnnnnnnnnnnnnnnnnnnnnnnnnnnnnnnnnnnnnnnnnnnnnnnnnnnnnnnnnnnnnnnnnnnnnnnnnnnnnnnnnnnnnnnnnnnnnnnnnnnnnnnnnnnnnnnnnnnnnnnnnnnnnnnnnnnnnnnnnctagcgcgctggcttcctggaaaagaacttgagtagcctcgggattctcttttcttccatctcataaccttttcccttttcacttctcccccgacctccgaattcaagaacctctgagaaattataacactattatgaggtttttggagctgatggagagagatgtagtttccttcttgtaactctttcagtgagaagcagtggcagagggtaaagcgttgggaactggatttttaagacacccgtattcctaatctatttgtagggatgaatcaaagaaaacccacttttcgggacgtagaggaaagcctggttcagaaaagtgatttagtgttctgcgcttagtttacgatgttggcggttcagaggcctgctcagaattctgattttctctgtgtgcttgagaatggaaaagttacatctagcgaagccctttctttagctgcgggttgtatggtttcctttcttcacgaaccgagttgcataatttgggggggtgggggagggagaaacaggatgcagctgtgggtagatttaaacaccgcctaaattttctcagttgttggagcttctcatcgcaattattttaaagaatgaccccttgctgttccttaacactggctactcataagctttggttgtcttttatttttaaaaagttattttttgatttaaaacactgtgccttaagccacagtgttgcccacagctccctgaaaagcgcggtgtgcgtgctttgacagccctttctgaagtttgtaggcccgtggacatctggctgaacccatcgattgtttctagttcttggtttaccacacaagccatgggagattcctgaaagtgcgttttcttctccctatgacgtgggcatggaagttttaactcttgtcactccagaggagtgctgttagagtctggccattggggtgtttgtgggaattcctgaacttgaatagaaaggctatttaatcattttatttgccctcgtcactgtctctatgtcacacttgtggcacagatagccaaattatgctttgttctccgttcgttttcctctttatgttccaaatatgttcaattcatggacaagaacttgttacatagttgtggcactcagtaaattctaaaactgccttctgaagttctaaggtgaacaggcctgtttccgttttacttagaacgcccatgtacgtaagtgagggggaaatcctgtgtgtgtgtgtgtgtggaaatgtgctaagtgaatttaagcagctttcttggtacaaattaatgaagggaatactaagaaatcttaagtccctattgctgacttaaagtttgccttggtgccttgagaactttagaggaagttaggtgaatggcatacaggtactttataatttctatatgaacataaaagaccttgttttaaaaactacaaatgcctcattctgctccaaggacttctcaaagtcaagaatagttatgtataagtctccgatcttggctaaagctctgttcctatttcatgagtaaatagtagtgagagacagagaggctttctttgttgggcccaaggatcctctgccacatttgagagtgctttaattccttagggtgcctggttggaggatcagccaacacagacccccttgagaagtactcgatatagataataggaatccattgacccaggatgttggaaaggctttgagcatgggaaaactttgcaatttgctgcttgagggctttatccaccaggctgcagtcttggaaggggtgcgggaacagtcgggattcatgtctgtgaagagatgtaattgagacttgtccttctgaacagttgagccccacatgggggttggcaggcagcagagaggcccctttcaaggtgttcgcgtgaagaactcggtgaaggagctcctgctacacatccgaagcaacaagcagaaggcttccggccagcccgtggatgagtttaaggtggcggcttctgctctttgttttgagtgggtgggagactagtccgtgaaggttattgtggtttgctaaccgaggtccagttaagtcccttgtagtctttcataggtgaccgagttcctaggacaggagatagatagctgtctgagtacgctggactccctgcccttggctcagtgccaggtgcgtctgagaaatttaatgagccaacaaaagaaagcagtttgaggacaatgggattccgtgggttcagtacacagagaacattttgattagagaggaatgaatcagatggtcttacttatttcatcctgaccaggattgaataggctaaagtgaaaacagagaagggggaggctgggaggagagagagagaaagagagagagagagagaaagaaaaaatatgagaatgagaatggaggtagcgttctgtcaggatttatatccccagaggcttatggggttctgtagagggtaggagagacagatctccaccgagtgagaaaccatgttgtatgtactaagctggaccctttcccattgcagacacagagtgtgaacattgagcagctgacaggtaagagctccatctatttttttttttttttccataatcttacccgggtcctctttgagtgaaacgattccgtgggggatataaatggaatttgtcaggttgggatgatgacagatcgcgccttctttctttgggaacagacctgaagagtgcagtgtccgcagtggggaaaagaaagggacccgatcctctgtccgatggaccggtttgcaagaggccagctctgttgccttctcacttcgtggtaagcgtctccctgttttcctctgaacactccgtggaactcattctgggatattgttgctattgaaaaaacaaaacgaaacaaaaacatttttgcttcttgggatagaagccaagtcatgaacctagcactgagcctaccccctagcttttggagttcttttaaaagaaatgcttatgagagcttcttgtcccccccctcccccccttctagacatcaccgcaaacgcctacacctggggagagcatggaagatgttcgccacagcgaatccaagctggatagcagcgctgccctgcttcagaatattataaacatcaagaatgagtgcaacccagtttcactaaacactgttcaggttagctggatgagccccacggttccccagaactcgccaagagaccagtgccaggatttccatggaggccaggccttctctccacctcagaaataccaaccgttccaagtcagtggctctccacagatgatggaccaggcgtcaatgtaccagtattcgccacaaacacagaacatgcagcagccgccgccgctgccaccacagcagcaacatcaacagaattatccccacaactcacccctgcagttcagtccttactccagaatgtcccagtctcccaagtatgattccaacctctttgatactcacgagccacagttctgcacgggccaaagttttgtgtctttactgactggcccgggggaacccgagtctcttgctgttcccgttccggctcccaccagcattccaccccaaactgagactcagctgcagaccttcagcctgatgccaagcaatgcctgcgaggccgtcgtcggggtgcacgatgtgggctcgcactctttgggcacgtccctgtcactccagaacatcatgggaagcccgatgaataccacccagctggggaagtcattttttcagtggcaggtagagcaggaagaaagcaaattggcaaatattccccaggaccagttcctcgctagggacggagatggtgacacgtgagtatctttttagttcatgtcctttcacgcttgaaccttattagttggcatgatgatgataattcatatttcaaggaaggctgttctttttatctttttttacccctcaaaagaaattactttttgttttaaattaaaaatatgtactttccgtgaataacctgctgtgaagactaatgtagattatatctttagaggagaaacagttagatcatgactaggcattgataaggagtgaaccagtaggctagatcctatccagtactaattaatgtctgtagagctttgggtaagttacttaaactctccctgcttctagttcttggcacataaacaataatgttttcaggcatagaatttttatcagtattgaaaaaaaacaatagggctgggcagtggtggcacaagcctttaatcccagcacttgggaggcagaggtgggcggatttctgagtttgaggacagcctggtctacagagtaatgagttccaggccagcctgggctacacagagaaaccctgtcttgaaaaaaaaccaaaacaaaagcaaaaaaaaaaaaaaaaaaaaaaaaaaagttttttaaatgctcagcctggtgttcagcattcttatccttttccgtttcagttcaggtagactaccaccatgtcagaagtgccaaatttctcctcctctgtgatgtttcattttgagtgtatcaatgtatcgttaaatagggtgaaggaaatttttctctgatcaacctaatgaagtcagaaacaattcctctttctttcgcctcttcaccaggtttctccatattgctgttgcccaagggaggcgagcgctctcgtatgtccttgcaagaaagatgaacgctcttcacatgctggacattaaggagcacaatggacaggtgagggtgctgcctcggctaagatggagtgctggagtgaggggtagccggtctccagtgcagactgtttaagagcctcaaatcaagagacttctgttaatattaacttggagatattgactttttgccaccattaaccttgaagtcattaatgcttactttgtagttgtttggccaaagattgcgtataattaagccgcaccctaagcttattttagtttcctcatcttgctgtgtttggttgcttattaacagggtttattttctttctgtggacattcctctcagccacagtttagtttcatattccttgttatgatagtgttacaggcttaaaaaaaaccatcttctctccatatgtccacagagtgcctttcaggtggcggtagctgccaatcagcacctcattgtgcaagatctggtaaaccttggtgcccaggtgaacaccacggattgctggggaaggacacctctgcatgtctgtgcggagaagggccactcccaggtgctccaggtaagaaaagaggccagaaagcaggcttctgttatcaaaagatgtgcttggatatgagccgtttcccgtaggctgcttgttaaaacaataatgctttgagttgatttatcccttagcccactagtagatgcctatttgtctgccccacctttggataacaggcgtgtattttataaaccttgcaggccatccagaagggagctgtgaggagcaatcagtttgtggatcttgaggcaacgaactatgatggtaagaggctgatactttattggctaaagcactgcatggaaagtggggtgcatgaaatctaagagcattcagtgtcctaagacagaaagaaaataaagcaagttgttctacaggtaaaaccgcctcggtatatgcggattatcttactaggttttatggagcccgttctgagtgaatcgaggaagcatcctaaggatagttacagggaccaaaagacttggtgggatgcctgacttcctttgtacccttttttcctaggcctgactcccctacattgcgcggtcgtggctcacaatgcggtggtgcacgaactgcagaggaatcggcagtctcattcgcccgaagtgcaggacctcttactaaggaataagagcctggtagacaccattaagtgtctgattcagatgggagccgcagtggaggcaaaggtaacttcacagggaaggtagagctggggtgggggagggggcgtggcagagaaaagtgggcgtggcggaggcctggcttgcaagcgcagattaactcctcccccctcctcacccccctacccacccaccccgatttttaagttggtggagtgaggggctttatatgtgtagttcagaagctaacctttgaaaagatcttttcatccgctttcttgatttctttttaatctgtggagttatccaaacaaatggatcatttaactgtgaaacgagttaatctttgttttaaatgaagctggaaatcgatggtacattggtttccgttttcatgacggtgcttttttggaatgatttcttagtgcgatctggaatttttaaattttgattttttttaaaaaatatttttataatgagatttttacgtgttttctgtgcgcctgtgtattggtccatgcggaagtcagagaatcacccataggagttggttctttccttccactctgagtcctggcacttagctcagctgtttagaattggtagcatgcaccttaccccctgagccatttctctggccctctgttaaactggaaaatattctttctaaatctggggattatttatggagtatctgctgtgtcctgaagcaccgtgttaaatactttggggattccgatgcccacgtgggtccccatagagcctgctgtcctctcccactttagcaatacatggtggctgccaagtctggcgacataacacatcatcagtggactttgatataaataagaaagtaacactttatatttctacattgttaagggctgctctgtgtatgagtggaatgtgacaagaatcaagtaggaaaattagttgggaatacaagaggaataggagagtccatgtaccctgggctttggggagactgaagaaggaagcgtccgaagtgatctctaaagctgctttagacatttgagagaggagggccaaagcatattgtctaaagcagctgttctcaacctgtaggtcacaacccctttgggggtgagggggtgtcaaaccaccctttctcaggggttccgtattagatatcctgcataacagatatttgcgttatgattcataacattagcaaaatttcagttatgaagtagctaggaaaataacttttggttgagggtcagcataccgtgaggaaccgtattaaagggtcgcagctttgggaaggctgaggaccgctgctctggggcgtggcatctggattttcagtcttcgcctttcttgccttcccaaggatcgtaagagtggccgcacagccctgcacttggcagcggaagaagcaaatctggaactcattcgcctctttttggagttgcccagttgcctgtctttcgtgaatgccaaggtaattttcagaacctcagtgctgccagcgtgggaatgaccttcccacctccacgcctttgagctcctttcctggaatggccctctgcctgacgcatgcgcgcttctgtcctcttgctttcaggcttacaatggaaacaccgccctccatgttgctgccagcctgcagtatcgggtgacacagttggacgcagtccgcctgttgatgaggaagggagctgaccccagtactcggaacttggagaatgaacagcccgtgcatttggtccccgatggcccagtgggagaacaggtgagggccacaggagggagtggaagttcctttaggcccttgcgactgaaatataaagagggaggaagtcgttcagggcaaaggccagctgatgctctgcaggtaggctcgtcagtgtagaatatttgacgtagttcaggcacaagtaaataaatgcctagtgaatatcagtttttataagtctgtctactaactgatcctccataagagatggaaaagaacctacaatatttttaaattatcctgttcttattaagtgtggttatatttcatctttgggggttgaatagttagttacacatgagtaagctcttctctgtaagaacttaatcttttaagaaattatttttggcaaacatcttttttccagagggaatcattgtgttcggcagcattggatagacaattttatacgctattaatcataagttaatttacacaggttagctttttgattccaagctgtcatcagaatcaaaatggcctagtaacttgcccacggaactcttaggaagtttgtggcagttttcatttaaaagttgcaaaacctttttaggcaggtttaacttggagaattaaacctgtatttagagaggacaggaagcgtgaataactaggaaatggcggtctcaagctcagtagtggctgcttcctcgtggtcacacacccagctgtcacacacccagccctgaggctggagtctgaggctcgtccccatccctaaaggtttttacagtgctgccattcttccttctgtattgtgtgtgctgtcacagagaggggcttctcttttccttcctcggtaggcggtggccattggacaggtttcctttcagaaagcagctcgcagcaacagccaccaaaatctcttcctctaattgcttctaatctctcgtgggctgaaaggcagatacacaatttgtctgattgggatacaaaaagtcagtggctctagatgactgtgggggctttcctgagacccggagagctacacacagttgcttggacatttggatatcctggccgctgctctaccacgagtttgacttggctgtgctcctaagttaggggtgcactgtagagggttaatgagaggagtgaaaatctgggagacatataccgcttggagcattggaagtaagttccacgattcctttctcttccagatccgacgtatcctgaaggggaagtccattcagcagcgagcaccaccatactaggtccactggcgtggagcctggttcagcgacactcactgtcagttaggcagtcctgatgtatctgtacatagaccatttgccctgtattggcaaatgtaagttgtttctatgaaacaaacccatttagttcactattatatagtggattatattaaaagaaaagaagacagatatctaattttcttggcagatttgcgtatttcatacccaggtatctgggatctatatatctgaatttgatcttgaatggtaaaattaccttcgataaccagtagctttcaggtagggaaaaaaaaaaagactcatgggaaaagacttgatctgtggcataaagccttgctcatgtagagattgccaggtccagattaggtgggcttgaaacatgaggtgaaaaatgaaagcatttgaaaggggacagaaatttggatgtgaggttgatgtgcactttgctgtcatcgatgcttctttggtcagatgcaggacctggtgtttaataatgctctctctctaggtgagggaggcctcttgataggatgtgatctttgaagctgtatataattctcatttttaccttttaaaatgttgtacatatttgatttgaaccacggacatttgaaatgtgtaagtcaatcaagtagaaaagagctagtgaattgttcaccactttcaaggttgtgcacccacaaagcaacttgtactgtgtaatcgtccagctagagtttttacagataaagcaaatggggaagtgggtcccaacgttgctgtggtagcaggcgggtttctcttgcattggaaacagacacgtttgtaggcatttgcgtattcttgaagagactgttttatgaatcacctcttagatttatgtaatttacctaagttgttgaagtttctgtttctccttaagagaaattacaaaaattcaacattgaagcatagtttcttgttttctgttgtcaaatagtaataatgtgctgtgatgtttatgcttattcataaagatgttttactttttagtgtaatgttagttcttttaacattattttgcttaaatttgataatgcccgacaagaatatattttgctttgatttatacactgattctttgtgacaaatatgacccattaaaaatgccttttaatagactaacttaccttttgtagctaggtactcatgttcttttttaaaagatgccctttggattggattggattgatcatgtttaactcagcgtattttatggatgaaagctaaatacagatatttggcatctctaaggtggaatgagcccactccacacactgataaaattcatgcatagttttaaatgaacattaataaactcatgttgtcttatgtgtttttcttttctagtgccttatttgtgtgtagtttgaagaatactatttttttttccattactaaaaatggactctaggggccttgtgtgtgccaggcaaactctttagctgctgtgctctagtcctttctagcctagaaaaggtattaacaacaaactcagagtcttaacaaacaaaacctttaagttacttacttttggcttttgtgtgtgtgtgtgtgtgtgtttgtttttgagaacatttcctgaaattatatgccctttttaacatccaaaaatggcttgctatattcatgagaagtttacgttccgaaaacacaaagtttagtagtagatgctgttaaactcagaagtttatataataaaaaagacggacaggtcagtggacacagcaaacagtgtagacattatccgagtcatcctgagagggagggatgccagtctctgaacagtgccaagtagtgtttttcccttttcccattattataattgctgcacccgcatcctggttcttgagagtacccgacgacagccatgaattcttggaaagtgtgcctgagtgtgtgctgtatgtacaggaatgacgatccacattgccaccatcttcttgagttcagctatggacaattgtgctaaaagattgtcacagctgagctattgactattaaccttccctcagaaggaggcagcaggaatgtcaatggactctcacctgaatatccaaccattcctcctaattagttgtatttctgctctaatttcaaggtcttaggaaggggctagtctattaggctgcggaagactctggggaagagggttctacctgtgagacatggacaatccatactgggcatacattttttttggtgtaactaatttgggttcatcaatgctcctttcggtaaccccctactcggtctatataaacctgattggtatacttgttggctctccaggggaacttatatggtggttgtcccttcccagagtgaaagtttttagtcagcatatgtgcaatgatgcatacagtatcaggcttagcagccctagaagaacaaggctcataggccaaggctctgtttcacagtttttcttttagataatgtcttgcgcatagattgtaaatgtacctgcttagatagccatcagagtaggaacagaacacactactgaacatgcctacacactgggttctctttaatgagcttatgagtgtcccttaattagtgttcccagcaatcggttctttcacaatctagtgtttaacaaagtgtgtgttgcacatgcataggggataatataaggcaaagatgtaagaggtgtggtatgcagctgggcgtgatagtgcacatctttaatctcagcacccaggaagcaaaggtagttgggtctctgtgtttgaggccagcctggtcgaccctgtcttgaaaagacacagccaaccgatcagaagagaggcatgccatgtactttattgggtagactggttgaagtgccgttgtgagagattccgaaaaggactgtacatctgggaggattcaaggataggggatttgggctagacatggaatagttgatccagatgctcagaaagggaggaggaaagtggaagaaatagaaaacagtgagaccccgggtggtgatctctgtgctgtttggttagaatctaagatagccaggtgcttctacttgtgttctacatgtgactggtaatattctatcacactgagaaagatcctcaaccttcctaggcgcttagcggggaggaagtacagtggtggactctgctgcaatggtatggaaggcagccccacagaggccaagaccgcatcccatactcgttgcttagcgtgtggccaaataggagattcatgaaacactagttaaatgagtgaacaagttcatgctagttgtggttagaaccactggttactgggggaggaagtactgtgaacaagggttcactattaatgaattaaagtctaatatatttagctatgtaattttacatcagtcataggtaaggataaggggccttgttgggctcttaaaaattatcctgtatatcagtatgtccctctttgcaaacaataatagtttggatatagactacagagtccccacaagtcacacaccaatgtttccagctttgttagccaaattagtagcatttaatgtcaggagcggaaaaatttctaaaactcttctagcttttagaaaatattgacttctttttaaattatttactcatttttattttatgtgcattgatattttgtttgcatgtgtgtctgagcattgatgttttacctgcatgtgtgtctgtgagagggtgtaagattccctgaaactggagttaacgacagtcgtaagctgccatgtgggtgctgggaattgaacccaggtcttctggaagagcagttagtgctcttaaccatctcttcagtcccctttccccccaatatcaacttataaataacatcaatggttttcattttttgataggatcaattactctattcttgaatagagtataattattagcagctactttatattgaaagtggcctcagggataaatcaacttcaaagttctgaggtcagtgtataaagtttgagctttatgtatcaaaagatggcctagtcagccatcactggaaagagaggcccattggacacacaaactttatatgcccagtacaggggaacgccagggccaaaaagtgggagtgggtgggtaggggagtggagggggggagggtatgggggacttttgggatagcattggaaatgtaattgaggaaaatacgtaataaaaaaaatatttaaaaaaaaaggaaaaaaaagattgagcttatttagaccagtatcagacacacagttgatagatattctcatggtttttaattgacccttgtgtggcttttcaatgcatcccccctccctgcttgacacagtgtataccttaaagtgtattttatctttgacatagagctcatgctttgatccagatctatttcacgtcattcaccatgcacaaatccagtttcagggttcttcttaaaggtcacactgtacaagggaagtatttccaggaaggttgtagattcctctcatatatatgtatatatacatatatatatatacatatatatatatatatatatatgtatatatatatatgccagtagagttggagcatgataatagcccagtggttgtaaaaaaagaggtttaatttttaactttacaagaaataagttgtcattagttattttgttttctgttttacttatgaataaatgtgctgttttccatgttggatcacagtatctaaagttgctcatgggggaagcaatatggtcataagattaaacactagttttctactcggagcacttgactttgtaaagataacagcaaggtgggtgctcgaaggaggttgcagatgttggaatgtgaagcgttaggcagctggtcctgagtccacatggctcacactccagttgatacacgccgctctcattgagtgacagccttctggctattgttctgcaaatcatgtcttcatcagctttgggagcggtttagatggatcgagcatgtgtttcctgttagaacagcagattagccataagtgggtttgacaggagagacgcatgccaattgggaaataatactagattccttagcttaacagattcaaggctcaagtttgacagctttgtttttaatcagctcattatctctcagtcctcttggcctgccttccttttgctgccaatgcctctcctatagagcttgagttccaagagcttgcatcagtgtggaacctcagggatggtctccaccagtgcccatggctttttctcttctggcactcattcattgctgaggaccatgttcatggagaacagactttcacaactgggttattattttttttaataaaatctttctatctggaattttttttaaagataaacatctgaacttgacttagcaacaacttcaaataaaatgcaatatactatatatatcttggtttaaagggaaacagacctctttagggacccacaaactgatttttttttttttgatatagatccaataaagctgtttattaagacagattgcctttcagtctctttaaattttatgggtaactgttgggttttttttttttcatgtgatatagtaaagatctatacagagaaatttaagtatgcatactatttcttttcctatatattctagccccacagagaataaaatgtagcatgttaaatacaaggggtttaaacaattgacaagtttatctttatggcattttccatttcccaagaggtatcaataggtagttttatttttcttttaaccaaagttctatagactctactacaaaaggcacattatctgttgaattaatttttgtttctattttttgcttgtcattactgcatgccaaggcttttgcatgttttctagattgccacaataatttttttgtttatcttttttgtatgtgagatgagtatgagtaaatgtggagtgtgtgtgtttgtagtgtatacatggttgacactttccttgattgcttttcaatttatccatacaaacaagagtttcctctggctgtagcagaaagaggatgccagagtgattttaagtctgagaaggactcaaccctcaattagtggcttggaggataaaggaaacggcatgtgccatggaacacagtagttcctttaaatgcagagagcaactaggctctcaagtcttctacacacaagggaccaaactctttcaataactgaataatctcaaaagccaatcctcctccacggcccaggtaacactgtttcacattagcattccaggcagataatgtagccaagcccatccagaattctggcctgctcaacttcaagttaaacacaatcggctttttaagctgctaagtttggaagaatggcactcaaaagaaaaacagacaccacaaacaggtaatacagtgttcgagcttgtagtgcgagtttgtgcactcctgttatcctaagactctgaatcagcaagagagatttcccaataagtgggctcgtcgtacaggctagcaggctttgtttatgattcctactgttatccatcagtttcccatggcaggcagaaatcaaaagaaagggaggtctcggtattgccattgtttctaacaccaagtgtgtaagcacttctttgagcagaggaaggtaataggacagcatatgtgacaaccagtactgtcagcccactggtcctactctgaccattcactagtgttatcaggaaggggcaggtagagagtggacactgaccttgccggcagctgtgatgtcagatggtgtgacctgcttatgaaataaatacagatacacacctcagaaactggtctttcaaaaagatggttactcagagttcttagaaagttgagaactgcagttccagccttcttgccacctaaaatcagaaccgatgcacatctctccaggtatgaatatgcaaggcaaatggctagacattcatgtgaaatacctgggtgtaattcataaagaacgtatttcttatagaatttacttctgaaggattcatcatagactcaccatgaagataatgcttccagtttaaagggatgaatgtcctttaaaaatcaacttttttttttaaataaaaaatttggaggggaattcaaacataaggactgtagttacataatttaatttcttgctctatcctttgatagtcattcattccatgtctccctctcaaattcatgaccttgtcatctgtaattgctattcagaaaagtgtacagttcaataatgtgtgcacccatgtaatcaacactcaagtcaagatggaaaacattcccatctccccagaaagtcaccccaccccgcctttgccatcagcccctccacacactgatcaaggtgactattgatctgttactacaatgtagctttgcctctactagcccttaatggaaatgacagcgcatgatatatttactctttctgttcagcatctctcactcaccctcgtgttgttgagtgtcatcagcattgatgcatttattgaggtatatttctattgttgactagttgtgtaaatagcatctgttattcatcttttggtggctgtcttagggttttattgctgcaaggagatgccatgaccacagtgactcttataaaggacaacatttaattggggctggcttacaggtcagaactttagtctgttatcatcatggcaggaagcatggtggcacgcaggaagacatggtactggagaggtagctgagagttctatatttggattcacaggcagcaggaagagagaatgagccacaaggccacccccagtgacatactttctccagcaaggccacaaccactccagcaaggccacatcacctaatagtaccactctctatgggtttatggtccataaaccaccataatggcctttggggtttctttcaattttcagttttggctttcatgaataaagttgctacagatagcctttgtgtgggtgtatgttctcatttcattttggtcaacacccaggtgtggagtttatatttgtgattgtttaattttatcagaaactgctgagctgttttcttttgcaaacctctttatcacttgtcacttccttgtaccatctgagagatttaactttgtccatcctcttgaagagttagcactgctaggcctgtcagtcttagctcatccaaagggatttctagtattactgtattattttatttttcatttttccctaatggctaaggtaattgattattatttgtttattgaccaattgtatatatatgttaaaaaaaagacagttttttttttggtgtttttgtttttgtttttacctcaggctggcttcaaacttattatgtagccaaggatgacatggaacctctgatcatcctttatggcctgagtatggggactattggcccgcagtactatgcctactttgtgtgttgatggggcttgaatccaaggcttcatgtatgctaggcatcagctagatgcaggtgacacttgcctctaatcttagcattcaaaatctgttgggggacaatcacaagttagaggttagcctaggctgcctagatactgagtttgaggccagcctgatttatatagtgagactttgtcttaaaactctataatgatcactgttgctacttagttttaagcgtttaaaatatacttatattctggatatttccattgacaatttatttcaaaaatatctttcagtctgtggcttgcctctccatcatttcttaggaaggtactttgacccattctttctttctcttctggaactttaaataattatagaatttcgaattgtcctagtatgtctgtggtccctactgccatctttggtttaccatgacttatttgttattattgtcattgaacttttcagcctcagacatttcacagttttaaaaatagagtttaaatttctctgctgggatttcctcttttcactcatggggtttatacttcccttagttctcccagcacatgcccttccttcagtaatgtttataatagctaaattcagaagctcaggaataactatccttgcgttccccttttcctggggagcacacctgcttgatttttgttgtttcaggcccagttgtttaactgtgtagacgttaatagtttatgtattgtgtagactctagaatttagtaatctaagcattacctttctctcctctgtagcgcagttactggctgtcttcctggaagttctatatgcttgttctcttgcttcctgaagttttctttggaaagctcaatgctttacaagtcccatctgtttcgcagcaattctatccccaaatttcattttctttgttgacatctagagtggaccttactctagattaggtttcacttcttttctggtatctcagtttggggcttagtgtattaagaaattgcacacaagatttggccacccgcgtccagcagcattgtatggtgttcttgttctttcttttttgttctttgtagttatgacaagccttgggatgtcttgccatgggcatgcttatcttagacccacgccaagaatttgtaaggaagcttccataccacttttggggcattctcttcttcccacttttacataccatccttccttctcagtgttgcatactgcagacactggctgcttcagttctcatcactgacttccgctgacctgtttcctcagttcagtaggactgtgacacttgaagtttgaacttcatcttcctgtggcatatttggaaaattgtacctagcattgtgctctagatccagggcaacctttgggcttaccaagtgaatttttgctttctcagtgttgaatttcccttgtccaatgtttaaaagcctcatgtcgtatctctaactgtagtgtttagagttggagggctagtctaatactagttgctttattatatttggaagtaaaagtttgaaatatatacgtttagagattacatcacaggaacttgagatgtggttggtatgagcttagcgtgagaaaagcctggcttctatcctatgcatattagatttcataatcagataccagatctcataaacaggaatggatttaacaaggatgtattacaaacttttatttgaactgaaaaagaagttttaacatcatgagttcatccaatgtcctataacactggctctattcataggaagtgagtatggtagaatgcagtttctttgtagttcttaaaactgtgtagccagcttctctaagaaactaaaacaaagggtctaatatagcacttacaagaataacttactgtttttgaatactgcatgttttaggtgctatttttaaattttatttctattaactgtaataatatattcttcataatatcatctaatttatccccagttgactgagaattaagtactagtcaatactcaaacatttactagctattgctaatctatttaaatatgaagtcgaagtacaaatagatgaaataattttcttatagtggcatatctggtaggtggcagataaggaaacctgtggaaagcttttgccagtgtcaattcaaaaagtgttgtacacaattaaaaagttttagaaacacaacacatgtgaatttatgaatggaaggtagacctttgtggtatgtgagagcctgtgggcatgtggaagctcctacctttggggtattttcagatgtaattttattttagtcatgaccttcaattggttaacatatgcttcagagccttgcttcaataccagcactacaggtaaacttgttacatgatttcataataggtcactcttcatttttttcaatcatacttgccatcagactaatataactatttactcactagataactttccttatagaccacaagctccatccagcccagcagccagacaccctttctgggatggagtacttagtaagtatttgctaaggggatgactggcaggttctcacccttctcaacttcctataaactcagtgcaacaccgatgatttccttttttttttccctacttaaaaaaaaataacacacacagtaaacattattttaacagaagtttataaatcagatagccactgccacagtcatgatacagaatagtttctatcttcccaccaaacattctctcttgttaactctttctgcttaaactctacatacccagcctttacttaatagcaatcactgagagctggtcgtttagtctgggcttttctctcaatttccattttggtttctctgttctgtatctgttttaatgctggcttgcatgcccactttattaaatgatttaaacatttaaattcattgccatttaaccattcacatggagtcatttgagccaatgacttgaccaccaggaagaagagggaagtgagat

SEQ ID NO: 74 - DNA, 4069 bp, Mus musculus
gtgtggaaaaagtccacaaacttagtcctcgctgcccgcctcgcctcctccggcccttctcggtgcccacgcacccccgatcgaacccgaggatgagcatagggtgtattttaggcgtgctgggcttccccgccccctctgcccacttagctggcaaaaagaaagccagccctataaaggaggccagggccaaggactggcctcctcccgccacgaggtcagacggcgagctctagagaaagaggctgcttaactgttctttatcatgtaacctcaaaaggaaacccagccgtcttctgatgctctcacgtacttgggggcattgtcgctgcttacagctgaaagcagttgaattgcttttacgtatttgtgtgactcgaatcttcaaatacaaagcttaccaagaagatcctgaggcccatgctgaacttcgccttttgatgttggctcgatgctgaagtcccgaggccaaccgcgtagccatccggtggcgcaggtgtctggggaccccgagcgcctagcctgggagcatgatcgtggacaagctgctggacgacagccgcggcggagaggggctgctggacgcggccggcgactgcggcctcatgaccagcccgctcaacctggcttacttctacggcgcctcgcctccttccgcccccggcgccggcgacaccggctacctgtccgccgtgccctccgcgcccggctcgcccggctccgactcctccgatttctcctccacttcctccgtgtcctcctgcggggccgtggagtcccgtcccagaggtggcgcccgcgccgagcgccctcaagttgagccccacatgggggttggcaggcagcagagaggcccctttcaaggtgttcgcgtgaagaactcggtgaaggagctcctgctacacatccgaagcaacaagcagaaggcttccggccagcccgtggatgagtttaagacacagagtgtgaacattgagcagctgacagacctgaagagtgcagtgtccgcagtggggaaaagaaagggacccgatcctctgtccgatggaccggtttgcaagaggccagctctgttgccttctcacttcgtgacatcaccgcaaacgcctacacctggggagagcatggaagatgttcgccacagcgaatccaagctggatagcagcgctgccctgcttcagaatattataaacatcaagaatgagtgcaacccagtttcactaaacactgttcaggttagctggatgagccccacggttccccagaactcgccaagagaccagtgccaggatttccatggaggccaggccttctctccacctcagaaataccaaccgttccaagtcagtggctctccacagatgatggaccaggcgtcaatgtaccagtattcgccacaaacacagaacatgcagcagccgccgccgctgccaccacagcagcaacatcaacagaattatccccacaactcacccctgcagttcagtccttactccagaatgtcccagtctcccaagtatgattccaacctctttgatactcacgagccacagttctgcacgggccaaagttttgtgtctttactgactggcccgggggaacccgagtctcttgctgttcccgttccggctcccaccagcattccaccccaaactgagactcagctgcagaccttcagcctgatgccaagcaatgcctgcgaggccgtcgtcggggtgcacgatgtgggctcgcactctttgggcacgtccctgtcactccagaacatcatgggaagcccgatgaataccacccagctggggaagtcattttttcagtggcaggtagagcaggaagaaagcaaattggcaaatattccccaggaccagttcctcgctagggacggagatggtgacacgtttctccatattgctgttgcccaagggaggcgagcgctctcgtatgtccttgcaagaaagatgaacgctcttcacatgctggacattaaggagcacaatggacagagtgcctttcaggtggcggtagctgccaatcagcacctcattgtgcaagatctggtaaaccttggtgcccaggtgaacaccacggattgctggggaaggacacctctgcatgtctgtgcggagaagggccactcccaggtgctccaggccatccagaagggagctgtgaggagcaatcagtttgtggatcttgaggcaacgaactatgatggcctgactcccctacattgcgcggtcgtggctcacaatgcggtggtgcacgaactgcagaggaatcggcagtctcattcgcccgaagtgcaggacctcttactaaggaataagagcctggtagacaccattaagtgtctgattcagatgggagccgcagtggaggcaaaggatcgtaagagtggccgcacagccctgcacttggcagcggaagaagcaaatctggaactcattcgcctctttttggagttgcccagttgcctgtctttcgtgaatgccaaggcttacaatggaaacaccgccctccatgttgctgccagcctgcagtatcgggtgacacagttggacgcagtccgcctgttgatgaggaagggagctgaccccagtactcggaacttggagaatgaacagcccgtgcatttggtccccgatggcccagtgggagaacagatccgacgtatcctgaaggggaagtccattcagcagcgagcaccaccatactaggtccactggcgtggagcctggttcagcgacactcactgtcagttaggcagtcctgatgtatctgtacatagaccatttgccctgtattggcaaatgtaagttgtttctatgaaacaaacccatttagttcactattatatagtggattatattaaaagaaaagaagacagatatctaattttcttggcagatttgcgtatttcatacccaggtatctgggatctatatatctgaatttgatcttgaatggtaaaattaccttcgataaccagtagctttcaggtagggaaaaaaaaaaagactcatgggaaaagacttgatctgtggcataaagccttgctcatgtagagattgccaggtccagattaggtgggcttgaaacatgaggtgaaaaatgaaagcatttgaaaggggacagaaatttggatgtgaggttgatgtgcactttgctgtcatcgatgcttctttggtcagatgcaggacctggtgtttaataatgctctctctctaggtgagggaggcctcttgataggatgtgatctttgaagctgtatataattctcatttttaccttttaaaatgttgtacatatttgatttgaaccacggacatttgaaatgtgtaagtcaatcaagtagaaaagagctagtgaattgttcaccactttcaaggttgtgcacccacaaagcaacttgtactgtgtaatcgtccagctagagtttttacagataaagcaaatggggaagtgggtcccaacgttgctgtggtagcaggcgggtttctcttgcattggaaacagacacgtttgtaggcatttgcgtattcttgaagagactgttttatgaatcacctcttagatttatgtaatttacctaagttgttgaagtttctgtttctccttaagagaaattacaaaaattcaacattgaagcatagtttcttgttttctgttgtcaaatagtaataatgtgctgtgatgtttatgcttattcataaagatgttttactttttagtgtaatgttagttcttttaacattattttgcttaaatttgataatgcccgacaagaatatattttgctttgatttatacactgattctttgtgacaaatatgacccattaaaaatgccttttaatagactaacttaccttttgtagctaggtactcatgttcttttttaaaagatgccctttggattggattggattgatcatgtttaactcagcgtattttatggatgaaagctaaatacagatatttggcatctctaaggtggaatgagcccactccacacactgataaaattcatgcatagttttaaatgaacattaataaactcatgttgtctt

SEQ ID NO: 75 - protein, 729 aa, Mus musculus
PGSMIVDKLLDDSRGGEGLLDAAGDCGLMTSPLNLAYFYGDPSAPGAGDTGYLSAVPSAPGSPGSDSSDFSSTSSVSSCGAVESRPRGGARAERPQVEPHMGVGRQQRGPFQGVRVKNSVKELLLHIRSNKQKASGQPVDEFKTQSVNIEQLTDLKSAVSAVGKRKGPDPLSDGPVCKRPALLPSHFVTSPQTPTPGESMEDVRHSESKLDSSAALLQNIINIKNECNPVSLNTVQVSWMSPTVPQNSPRDQCQDFHGGQAFSPPQKYQPFQVSGSPQMMDQASMYQYSPQTQNMQQPPPLPPQQQHQQNYPHNSPLQFSPYSRMSQSPKYDSNLFDTHEPQFCTGQSFVSLLTGPGEPESLAVPVPAPTSIPPQTETQLQTFSLMPSNACEAVVGVHDVGSHSLGTSLSLQNIMGSPMNTTQLGKSFFQWQVEQEESKLANIPQDQFLARDGDGDTFLHIAVAQGRRALSYVLARKMNALHMLDIKEHNGQSAFQVAVAANQHLIVQDLVNLGAQVNTTDCWGRTPLHVCAEKGHSQVLQAIQKGAVRSNQFVDLEATNYDGLTPLHCAVVAHNAVVHELQRNRQSHSPEVQDLLLRNKSLVDTIKCLIQMGAAVEAKDRKSGRTALHLAAEEANLELIRLFLELPSCLSFVNAKAYNGNTALHVAASLQYRVTQLDAVRLLMRKGADPSTRNLENEQPVHLVPDGPVGEQIRRILKGKSIQQRAPPY

SEQ ID NO: 76 - DNA, 53222 bp, Homo sapiens
  misc_feature (1)...(53222): n = A,T,C or G
tatatatatatatatttttttttttttttttttttttttttttttttgagatggtgtctcactctgtcacccaggctggagtgcagtggtgtgatctctactcactaaaacctctgcctcgcaggttcatgtgattctcctgcctcagcctcccaagtagctgagattacaggcacctgccaccatgcctggctaatttttgtatttttagtagagacgggtttcaccgtgttggccaggctggtctcaaacttctgacctcaagtgagctgcttgctttgccctcccaaagtgctgggattatgggcatgagccaccttgcccatcctataggacaattatattctgatgttactttttcaaaattgaccgtgaactcactgagggcaaggactatatagcttatccatctgagcattgctggcttgtagcacctatagtagtgggcactaagtaggtgctaaggaaatattagttaaattggattgtcaacatttacttaaggcacttaagggaatatttagggatatgagacacatcttctttcctcatgggtgcacgtactaagtgatgaattatacagagttttttaggaataacaaggactgccactgattcctgggaccttcagaatgtctccaggcaactggaccttgaaatacaacttagagggagaaaagggaatttttaatttgcgatgctatctgtgttattctcatgatagagatggaagtttttctgtaggacattaacatgatttttcatctacagggtaaaattgaaagtcaaaagaaacagggttgcttctttcttttgcttattgcaaaaagaggtgtttgttttcatttttcaaaattacatttgaacttgccttaattttatttttaaaaacattcatttttaatcaacagataagtatatttatggggtacaatgtgatattttatatatatacattgtggaattagtacatcaagtaaattaacatatccatcacctcacatacttacttttttatagtgagaatatttaaaatctcttcttttagcagttttgaaatatatgatacatgattatttactatggttaccatgttgtgcaatagatgtctaaaacattttccttctgagaccttgattaatatttccccattgcacctacccgtctagcagccctctggtaaccactattctactctctacttcaacttttttaagttccacatataagtcagtataaggcaaatattgcatgaggttccacatcaaagacatctgtgtgtggcttatttcacttagcataatgtcctctagtttcatccatgttgttacaaatgacggaatttccccaaagaagtatttggttgctgatatgtgctcataaaacagaagttaaagcccatgtcttgagagaaataatatttatctgttaggagaataaaatgtaaatgccaatttgatttttataatttaaattatcataaacagacacttctcaaaagaagacatacatacagccaacaaacatatgaagaaaaagctcaatatcactgatcattagagcaatgcaaatcaaaaccacaatgaaattgtggttctcacaccaatcagaatggctattattaaaaagccaaaaaacaacagatactggcaaggttgcagagaaaaggtaacaattatacactgttggtggaagtgtaaattaattcgatcattgtggaaagcagtatggtgattcctcaaagagctaaaagcagaactaccattcgacccagcaatcccattactgggtatatacccagaggaatataaatcattctgccataaagacacatgcaagcaaatgttcattgcagcgctgttcacgacagcaaagacgtggaatcaacctaaatgcccatcagtgacagactggataaagaaaatgtggtacatatgtaccatggaatactatgcagccataaaattgagataatatcttttgtgggagcatggatggagctggaggctattatctttagcaaactaacacaggaacagaaaaccaaatattgcatgttctcacttataagcgggagctaaatgataagaacttatgaacacacagaaggaaacagtagacactggggtctacttgagtgggggagttgggaggaaggagaggagcagacaaggtaactattgggtactgggcttaaaacctgggtgatgaaataatatgtgacacattttcctatgtaacaaacctttacgtgcactcccaaacctaaaataaaagtaaaaaaacccaaactttttagacatagataaaaaagattgcaatgatcagtgcaaatagcaacatttcttggcctaataattagagaaaaatgggttattttgtttttcaggcatagacaggtgtagtgtagagtctatcactgatggtgttatttataatgaatgttatgtttatgtaataatttaaataataaacatgttagaataaaggcccattgatacaaaagggggcagagttcagtgaaataggtattccctttacatttatattgtacctttttgttgtacttaaaaaaaaattgttatttgaagccacttaataaggtataatcaaaatatatgtgcttggtttgaaggtttttatgaacttgagttttccttgtttcagatttagtggagtttaacttgggtagtcccaagaatgtgggtcccttccttgcagtggaccagaagcacaacatcctgctcaaataccgctgccatggtccacccatccgcttcacgactgtctttagcaatgagctccattatgtggcgaatgagctgaatggcattgtgggagggaagaacacagtggttgccatagctgtatggtctcacttcagcaccttccctttggaagtgtacatccggcggctcaggaacatccgtcgagcagtggttcggctcctcgatcgaagcccaaagaccgtggtggtcatccggacggccaacgcccaagagctgggacctgaggtgagccttttcaacagcgactggtacaactttcagctggacaccatccttcggaggatgttctcaggggttggagtatatctcgtcgatgcctgggagatgaccctggcccattatctaccgcacaagctgcatccagatgaagttattgtgaagaaccagctggacatgttcttgtcctttgtgtgccccttggaaacctagcctgtcttggaagggactggaggaatcatattcaatgaccttctcaattgacctgagttacagaaagtggccccagtgagagatgactgcccttaataagtataaaatttcaaaaagatctggacttaatatgatgacttataaggagcttagaaaatgcaggttacatttatatctacctataggattttatccaatgttgacttagccatggtagaactcttaactgcatctacacactatattgctcttgtaaccaaagatgctaatgagtgtatttgaattagcttctcctaggaggggtgactactttgctaaagagtatgaaaaatgttttgatggaagggacaagtttggttggtagtagagtgtttgtagcttatctggtaaaggaaattgagtgcatctgcatgcatagcacaagtaatccatcttctggcggttaactagagaaagcttatagtcagaggctcttgtgaatgcactgaagactgctgtgtctcaggagtttctcttgatgatctaccttttctgaattacttgaaaaggccaatgtgcttggttcgagttttttagtgaatatttacaatttcctgcttttatctagaaaagaagcaaaagggaaatatgaaagcagtatatataaaatctgtgctttggaattgatatttgcatttggtgattgttttttatttgattcagctaaattttatgtgttgaatacttactctagaataactacttttggaactggaagggggaaatctgtaaatggaaatttatttttatgttctgaaatttgagggtttaggaattgacttttgtgtaaagaatgctacggtattataaagctgtggaagttttttccactagtttcaggtgttttttttttttttgttgttgttgttattttgaactacttaccaaaattagaagttaaaatctaattagaaattaataagatactaaaattcatgacagttttttgtttgtttgtttgtttgttttttggtatttcttgatttgggcataaaaggcacacccattctctcatgcttggaagaagctgctattcctactggctatctaagaagaatggaattattaattttatttgacttattaattttaaacgagtttaatttgggatcatttagtaagtactcttttctttttgagctgtgatagattatagtctagtttaagttgctcctaagtagacagatgaagaaactagggaggctttagagaggaagacagatgcttgaagtatgaacaatatatacccttagaagaatgggtcaaataatttgggtttttaatttaaaataggagggccccagatcttactttcctgtccttgaggaacaccttcaagtttttaaagtattttagggggaaagaagatttttaattgtttctgagcctaatgaggtaataaaatatattaaaatagtttaattttaatggtccttacgctttacagtacctaaggatcacttgtagtatctgacaaaaatgcagaattaaagagtcatggcagggtgtggtagctcaagcctgtaatcccagcactttgggaggccaggcaggaggattgcttgaggccaggagtttgagaccagcctgggcaacatagtaagacctcatctctacaaaaaataaaaaattatccaggtgtgggccgacagtcccagctactagggaggctaaggcagggtgattgattgagcccagtagtttgaggctgcagtgagttatgattgcgccactacactcccacttgggcaacagacaagagatcttatctctaaaaaatttttgttaaataataaaagaattaaggccagggatgttggctcacatctgtaatcccagcagggattatagtctcgggaggctgaggtgggcggattgcttgagcccggaaggtcaagaccagcctgggtgccatggtgaaaccccatctctacaaaaaaatacaaaaactagctgggtgtggtggcaccacctgtagtccccgctacttaggaggctgaggtgggaggattgcttgagcccaggaggcagaaggttgcagaggttgcagtgagccttgattgtgccactgtactccagtctgggcaacagggcaagaccctgtctctaaaaaaaaaaaaaaaaaaaaaagagggaccatgnnnnnnnnnnnnnnnnnnnncttacccttccagggccttggggcccttttgggttttgcccaaaatccgaatttaagaatctcgcgcggggtgggtgggtccaaccctttattcccgcccttttgggggccccgccagaggttgttttaggccacgaattttaaaccacccttgggcaccaatttaagcctccttttttccaaaaataaaaaatttttcccggtggggccccccgttcccgcttctaaggagggttaaggagggggtttttttttggcccctaattttaggcccccattaatttttatttggccccctcccttccccttggggcacaaaccaaaaatttttttttttaaaaaattttttttaataataaaaaaatttaaggccgggggggtgggtcccctttggtatccccccaggggttttaattttcggggggttaggggggggggtttttttaagcccgaaagttcaaaccccccttggggcccttggtgaacccccttttttccaaaaaaatccaaaacctgctggggggggggggcccccccgtaagtcccccctcttttgagggttaagggggaaagtagattttgcccccggggccaaaaggttccaagggttccattaacccttttttgggccccggttccccctttggggcacaaggggaaaccccgtttttttaaaaaaaaaaaaaaaaaaaagagggaccatgatgcctctgggatttatgaaaccaacctttgtggcgagtgctcagtgattctgatgcaatggtggtattccacactgtgagaaacactaagagaagaggtaagatagaatgagggaataaacatggcttgtttattattttgggggatttaccaataactggtttaattctgttcatgatccaatagtattggtgatattagctccattttatagatgaggaactcatgtttagatctgaaataaggtatgtgagagtccatatctcttttcagctaaacttgtgagactttcgtaaagaagcgtttgtatttatttatttgtttttgagacagggtcttgctcttttgcccaggctggagtgcagtggcatgatatggctcactgcagccttgacttcctgggctcaagggatccttctgcctcagcctcctgagtagctgggactacaggtatgtaccaccatgcccagctaatttttgtatctttttgtagagactacattttgccatgttgtccaggctggtcttaaactcctgagctcaagcatctgcccacctcagcttcccaaagtgctgggattacaggtgtgagccactgtgcccagctgagagtttttcttgtcgtgaaagaacttgacatttcctcaaggatttataaaggaggctgaggagtaattttcccaggagaattttaaaaagaaagcgggcattgctcctccagtggtttggaatgatgccacttgattgtgcaaatgatttcttatgatcttgtctggttttctgttattttttgatttggtgacatagctctcaaagatttggtgacacagcttcttgagtcactttcatctctcttaaaaaaattttttttttaacaacttttaagttcaggggtacatgtgccagtttgtttcataggtaaacttacgtcatgggggtttgttgtatagatgatttcatcacccaggtgttaagcctagtacccattagtaatttttcctgatcctctccctcctcctaccctccaccctccaatagaccccagtgtgtgttgttgccctttatgtgtccatgtgttctcatcatttagctctcacttatcagtgagaacaactttcatcccacatctaatttgtctttcttcactctggtgtggaaattttgatagagattccaatatcacttaaacgtttcccagaatatttagatagaataatttagtttcttctgaaaagtttattttaggctagtgccacatggttgtgaatattagcatggtagccaaataatagtttgtttaaatgtatatttcccaatataaatataaggggcatcataatttttaaaaactataaaatctagaagaaaaatctatggataaaatccataattctatcatctgaatgcaatgaacattagcatttaggtatattttcttgcaggttttttaaccatatacttatagagaatatgtaatttgggtctgtgttttttacatataaatatttttctatgttaaatagtcttcataagttaattataaagatctgcttaatagttctgctactgcagttttcattattagataagttggtcattatagttggacatttaggtttacaatattaaagcagtggtttatatcaatttcagtggtttaaaatatgaatttctattttggaatgaaagtattaatttaatgtagtgaatctcatattccagaactgagatgattgatttgatgctatttgtgacagacagaacccataataaagcctttctatgcaagttacattttatagaattatcctactaaaagtaacctttcttcagcgaatgcaaaacagacctttggtgttccagtatgattcattttgccattctgaacaactatcattttaattaagaccatttaactgacacttcctggattcagttattaagtttcagattgaaacttgatccagtttaataactgaatccagtttcacatttatcaatctgaaaacttagtttgcagattggtaaatcagggtacttgacaagaataaatatggtacgcctttatatattcatgtgttacatgccagaaatgagtctgtttctggaccctgttcaaggaaatagtgatgactgagagaggtacagggaaataaacacccaagggaaacaacagaaataagcctccccaactttctaaaaaactgctcagcattatctctgtggattctgggtaaattcagctttttaacatcagctagtcactaatgccagaaattccacttcaagtgtatttattttcttgtgttaagcattattctacctggtttatgtctacaatgtagtattagtgtacttaggattcttgacacctcagtgtgcaataaataaaattttgaagttgttgtttttcatttgaaggtgagaccacagcccctgagtgctaaggggacctgggaatcctaggggaatggaggtggtggacgataagaggatggttgagggcaggagtttaaaggacacagaagctaggagagcagaaaatgtactccaccaccttctgtctaacttgtctcttaaaagtgcttttacattttaacttttttaaaaaatgtgggccgggcatagtggctcatgcctgtaatcccagcactttgggaggccgaggtgggcggatcacctgaggtcaagagttcaagaccagcctgaccaatatgatgaaaccccatctctactaaaaatacaaaaatagccaggtgtggtggcacatgcctgtcatcccagctactcaggaggctgaggtgggagaatcgcttgaacccgggaggtggaggttgcagtgagccgagatcatgccattgcactctagcctgggcaacgagagtgaaactctgtctcaataaataaataaataaataaaaaataaaaaagtgtgaacttaaatatatttatatgtgtgtacatatattttcttttttaatattctggttaaatgagaggccatcgggcctctttttaagagtctaatgatgtgtatatctaatgcccattccagctggattgtaacactgcttggggaagataacttaaaaaaaagtagtaccgagattacagcagctagtgtcctaaatggaaaagaagtgaaactaaatgtcataggagaaatcctttcagttttgtgcagtggttcatttgctgttaaatctaccccattaccattccccttactccttgaaaataaagtgatcttcatgttacaggaccattgctttatttatgtcacagatttcttgtcctttaattagtcagtgaaggcacatgattgcgatactactttttgattgccgtattgtaaaagctatatggtaaaaggtaactccctccacccgcccactgcaccctcacgtttaggggccacacagaaaaagcgaaataagatgaggtgaatctaatgagaaggcaactctaatgcccatcaggagattcactaggacattttaaaaggacgtctttaaggaaaaagttttgtttgtagatgttgcctctgattcctccctgcggctccagtccaggtcttggagccggccctcgaggggaatgtccgggactcgggtcggtacctttttggtctgggaatttccagtgtgcagaaaaaaaatccacaaatctaggcctcgctgccccctccctgcctcctctggccctcctcagtgcccacgcaacccggttcgaaagagaggatgaccgtattctgcattttagaaaacaggctcttagcttcccccgcccccgtcctcactagagtggagaactgaaagcgaacgctataaagggcgccagtgagaggggctggcctcctcttgccacgaggtcagacggcgagttcttagagaaaaaggctgcttagctgctgcttatcatgtaacctcaaaaggaaactgatcgtctttctcatgctgtcacgtacttgggttattatcgctgattacagctggaaacaattgatttgctcttacgtatttgtgtgacttgactcttcaaacacaaaggtatatttttattatctgatattttattaaaatatcttaaatggtaagattttttttttctttttctttcctattcccatagtcagattcttaactttggagtcactctcttatgtttgagtagccatacttgctttggggcaaaatattgggggatagttttttggagaaagaaaatctgggatgtttttgtagtttagtaatagcaagaatcatgtctgtttgctttaaaggcccaggaaggactgagatactaatggaggagatcgatagaatgggtgatgaagtatcataaatctaatgtaacactatcttctgtcagtgacctagaactatgatatcccgaggcagaagtctcccaggagatttgatgtgtgggtttagaggagtactttcccaccaaccgtaggcatgaaactatatgggaaaatatatcagagtaaattgaaatactttatagcatgccctcattcattcttacagctgtaaaattaaaatgtatgaatggccattttatgaatgaggaaaacctgaaatttgatgatttggctggacccccagattcatgataatctgtatatgttaaggggttttgtttgaataaaagcacatttctaaatagaatggattagagattctcttcattgggattagtgaattcgctgcagtggctgaaggtgctgtcccaaagaggatgacagttacgtaaattttaagcatttggtaatatatatttcctctatttaaatctgacatctaaagaaatatctggctgggtggaatatttttttgcttctgttagacagtaggttgtttagacaataaaaggagagaaaagtttatcctagtctcattcaccaccccgcataatccctgatggagcagggcatcagccacacagatcatctaaacaggcagataaccctgcctgtttatttatttggcctcagaatacggtgtatggtccaccacccctctccaccgtctttctaacatcatcctgctgaggccaaagacacagttgggcagggtacaggcgtggagcactgcggtggcagagtcagtctgagaggagttagcacatgacatcagtgcacagtgcagatgacggaaacatttggcagcatcctctccagtgtggaggtgatgaccgaggtcagcataatccagctgttcagatacagacttttcctcactgaggaagaggaggcaaacccttctctttcttgtcctgtaacagacaagacaagaaagctctcagagagcaaaacaaaccctttcagaagctacagagccatggaaagcattactgaggggaaagattttctaattgttctgagaccaataatgaattgctcctgaaaacaccattttcttttggctcatagctgacactgatctggaggcctcttgatttttttctcccaggttaacaggaagatctcgagggccctggctgaacttcaccttttggctttcttggcctgatgctgaactctcgagggtgagaagggctgatatttctaaacaagtagcatccaggtgttacctagcttctggctgatgtcaaaaagggcagtgggatttttctaagatttttctcttaaattagacatttttttgaagttgctacaaaattactatgaattttatttataggcattttactgtgatttcatgagaactaagattttttgtgtgtgtgtgtgtgtgtgtggtttagtagtatttttttaaaccaatttgttgaatttctgctattttccatagcaagaggacatatgaatacatctaagaggggaattcagctctctgcttactgacagtttcagggttatgtaatctttaacaggcttggagagcatcatgccccctctcagttttggtgaagaggctccttaaaactagcatatgtggtttctgattaaagcactttctgttcctttaatttgggattgtctgtgaagtaaaataccttcctttcaaccgtagggaatgaaaatatttactgccgctgatggagttagtggattgggaattaacacttattaaacacttgttttgggagcttaccagcaagatctcatttagccctacagcattttttaggtagctgtaattagctttattttatttatttatttttgtaacttcaacttttattttagattcagggggtgcatgtataggtttgttacctgggtgtattgcgtgatgttgaggtttggggtacaactgatcccatcacccaggtactgatcatagttatttttcagcccttgctttcctccctctctcccccatctagcagtcctcagtgtctttgttgccatctttatgtccttgagtatccaatgtttagctcccacttaaaaatgagaacatgtggtatttggttttctgttcctgtgttaattcacttgggataatggcctccagctgcatccatgttgctgcaaaggacatgattctattcttttttatggctgtgtagatttccacagtgtatacgtaccacatttcctttatctagtccactgttgatgggcatctaggttgattccatgtctttgctattgtaagtaagtgctgcagtgaacatacaggtgcatgtgtctttttgatagaatgggaaatataaccacgacaaatggtgaattctgtcatggttatattaaacaataatcacaatgctacattctctatacatgataccaaatatctgaattaaacttatcaaaatactgttaattacctagatgttatatctataaaatgccaacctccagatatttggagacattaaaaatgattttttcactgtttgttcagatatttagcaacatgcaggcacttttaatattggtagaagacttttggatatgttttagcattgagtagtttatgtgcatccccattcctctgattgtttcagtcaagtttgctagacagcctagtactgtgaatctgtagagggtctaatactgtaaatcatgcgttcttagagagggtgatattatctccaagagggcaaaaataggttcttcagggaaaaatcttagctattacaatagtttgtggcccccaaagggccatagtacataatagatatacagtatatctgtgatattaaactttcatcaggggatgattaggaaaaagatgtctaaaaagaccctgtagtggggtctaatactgaaagaaaggttgagacatgtcattgtaaatgctctggatgtacttattcaactgaggtcaaaagatttttctgtggtttgttgtctttttgtgtcttgctttgtgtctacatcctcatttttcatggattttaaaagtactggtttccagagggggaacaacgtttttagtttcttttcttttctcttttctcctcctcctcctttttctccttctccttcttctcctccttctcctctttttctttttcctctctctctcctttctttttttttgatacagaatctccctctgtcgcccatggttggagtgcagtagccccttcttggctcactgcaaactccgccttccaagtttaagtgattctcatgcctcaacctcctgagtagctgggactacaggcacatgccaccacgcccaactaatttttgtatttttagtagagtggagtttcaccatgtttgccaggctagtcttgaactcctgacctcaagtgatccatctgcctcagcctcccaaagttttgctttttttttgagacagagttttgctctcccacccaagctggagtgcagtggcatggtggcatgatcatagctcactgtgtcctctaccttctgggctcaagtgatcctcctgccttagcctcatcagtagctgggactactacaggtgcatgccagcatgccaagcttctttgttcttttttgtttctttctttcttttttattttttattgtagagatggggcttgctatgttacccagactggtctcaaactcctggcctcaagggatcttcccaccttggaccccaaagtgctgggatacaggtgtgagccaccatgcctggcttcatatttatttcaggaaagctttattgattatatccttaaatactttaaatatatatttttaaattgtgataaaagatacataaaagttgccatcttatccatttttaagtgtacagttcagtgccactaagtacttttcatattacaacttttgccaccacccatttctagaactttttcatcttccctttgactgaaactgcatatccattaaacaataattctacatttctccctcccccaagtccctggcaaccacccctctactttttgtctctatgaatttgatgactctacataccttatgtaagtggaatcatataatacctatcttcttatgactggtttatttcatgtagcgtaatattttcaaggttcattcatgttgtataaatgtcagaatttccttcctttttaaggccgaataatattccagcgtgtgtgtaggtgtgcataccacactttgtttatccattcatctgtccatggacacttggattgtttcttttggctatcatgaataatgctgctgtgaacatgggtgtacaagtatctgtttaaatccttgctttctttacttttggggatatatcaagtcattctatgtttaattgttttaggaactgccatactattctacacagtggatgcaccatgatgaatttgtttttaattcattttgtgcagtatttggcacagtgcagtgaataagtgcgtacaccatgaatatgtgatagaaaatgacacgaagttctgagtaaatctgcgcagtgattcggcaccactattaaaacactgtctcctatttattcacccttgcatgtccacatactacagtgcacacacttatgaagatgtgcatggttgagaataactcctatgagaatcattgaggtaatgcacttagattccatgtgggtcagatctttttggaaatttggaccgctggcaatgcagttccacatcttaaacctagggaggcttgctggaggtttaaaagggccagagctacaaaggtgatccatagatgtggggattaggtcttgtgaatgaagatgaactgaggacactttgaagataggaattgtgtgagttctgatttttacccttctcctccccttccacacccattccctcacctctgtagcatagcacagggtgacttcataaattttggttgaacaaataacccagggtggaaaaaaaatgaaatgatgatttattttttaatcataacagctgtgaaaagttgttctgaaggccataagaactttctatgttgtatctttgctatgggaaaaggaggtgcgtttaatttgaggtggaagataagagtttggaaactgaaagtgatcactgggcaaggctgccaaatttacccttggcatttctagtgtcttgagagatgagctgtctgaaagatggcagaggctgatatatcatggaccttcccaaccctgctcttctgtggtaaggtttcgtatcttgtaaacagccaatgaaaacagttctgtgtgtttacctctagtattgaacagtatccagcatttagataagaaagggattgttaaacccaacagtaatgtcaaaatctagggcagagtgacagattgcagccaaattgaagcaggcaggaggtggactgggtggtgataataatgttaaaggacatgctttctccaccccatacctcacttaggtttgttggctctccaaacttcatggttgttcatttttgggagcctctcttaaaatgcaaataacctttaagaagggttactgttgatgccttggtgggaattaatttttagattctttcttgaaattttactggataagtagggcacagagactgccccaatcagagtgcagataaggggtgaggtagagtggcaggagcagtgcagggaacagaatgtgaaggttaaaatcagacttggtacctccccaactctccttcagctggctttcttgtttctgttctttgtgccaccactattatcctcaaggccttggagttacctctgaccctcatctctcttttccctgccctgccctgcccttcccttacctccttctctctctctctccttctctttccttccttccttcctttcccttttcctttccctttcgctttcctttcctgtctcactctgttacccaggctggagtgcagtggctctatcttggctcactacaatctctgcctccggggttcaagcaattctcctgcctcagcctccagagtagctgggactacaggcacccgccaccacgcccggctaatttttgtatttttagaagagatggggtttcactgtgttggccaggctggcctcgaactcctgacctcaggtgatccacccgcctcagcctcccaaagtgctgggatcacaggcgtgagccaccacacccggcccctcccctgtctttctgtgttcagtctcttgcctatagattaaatgtgtgaaatctctaaacagttcccctctttccatgcccaggagcaccacttcagttcagacctccatgacctgtcacattgactgttgcagagtctttcctgatcacttccacacagctgccactgtgatcgtgtttttatcttgttcgaaacccctgaatggctccccatcacatctgctgtccattgtttgcaggcagcatcagggccctgaagggttccagacttgactctgtggtcctcctcttctcctatgttctcttcaagttgggccgatggtccaaagaggccaaaatgcttaacaatgaagtattaattagaactttgaaaaatgagtaataattataactaccatcattgagtgtatattatgtgccaggagttgtgctaggcatctcatgacactaccacgtttaacctacctactagctgaatgcagttaatatacccattttatggatgagaaaagagtcttagagaaattaattaaagctggatggttattaagtgaatggagcttggatttgaacccaggtttgtttaacttcagaaccccatgcttttaatcaagggaagaagaatattacaggcaagaattctagcttgggtaaaaatttggaggcaagaattagtgtgctattttagaagatattcataaggactgcatgctgaagaatagagatagaagtatgatgggataatgttttagtttgctagggctgccgtaacacaataccacaggctgcgtggcttaaacaacggaaatctgtttctcactgttctgggagattggaagttcaagataaggtgttggcaggtttggtttctccgaggcctctctcctgacttgtacatggccgccttctcactacgtcctcacatgtggcgttttctctgtgcatgggcatccctggtgtctctaccctcttataaagataccagtcagattagatgaggactcaccccgacagcccatttttaacttacactctttaaaggccccatctccaaacatagccacattctgcggtactgggggttaggacttcaacatgtgaattttggggggacaccattcagtccataacagataggtttgatgtagcttgattttagaggatgtgaaaaccaggcacagacatttagctttgatatggaaggtcataaggtccaattgtggttcagcaggggaaaacatgaatatcattgcttcctcaagcaaacttctagctactcttaaacataaaggtagttagaattagtagagtactaaggggtgaatggggaccatttcggagagggaactattaacacttttctatagtggaatgaaagagtagaaacagtcaaatctttaattcctctagaggtttctggaaaaatgaagataatcctttggtgagggtagagggacagagtggggaatatggcaagtttcattttagacttgattatactcttggcaacatggaattagaactcagagaaaaggtcagagctagtaataggaatcaactctagacaggtcagaactgaacctgtggaagtgggtaagattgctcagacttcaaaaaggacaagagacaagaattctcacatctgaaactgctttgttgtcacactggtttggaggatagtagggaggctctccgggaactctctacgtaaaataacacctctggctttcttccttgaccttgctttgcttttcttagcacatcatggccacctggcattatcttatatagctttttgattattgtctgtctttcccagtagaatgtaagctctgtaagggcatcgatggcctttctgttcagtactgtattcgcagtatctggaagcgtgtccggaacattgtaggtggtcaataaatatttactgagtgaatccatgaataggtgaatttctataatcgatataatttaatttgataattagattgctggatatttcccttttatcttttcttaaagtaaaaatttgttctttaacaaatgtcttttaataaatgaacgtacagacacatatgtttgagaatctctaaatatccaacctaaaaacttgggtttgtttctgtgttttcccttaacttgtactttccccaaaccaagatcacctggtctcttctctgctacatcatttctttatgacaaagtagttatgactctctttaaaaagccaggcatttcagcactctggttactttgatcagattatctattcgtatctacttttatattttttgtaactttcataggttatttgtggagtccttggtttctgtgaggtctcttttccctgtatttaaagattcccatctcattgtaccgatgtgggtgccagatcatatgaacataagaaatctgtttacaccattctccattcttttctctgggagtactgccaattatgggatggtgtgatgaagtcataaaatacaaccttaggtaggataggcatttaaaccaagtccactctctttcctttttctaagggatcataatcaaaggtaaatgtgaatctacttgtattttatacaggtgaagactcagtaaatctagcttttctttctcactagtctgagtggtatacctggcactagaattattgtgttaagtcatttaaagcagtgactcttcagcagatggggaattcctccttaaaggactattaaaaaatcattgaggaagtgttttcaagggccacacatcccctttttgaaaatcatagtgggtgattgagccacagcacttagcttgagcaacagagtgagatcctgtctcaaaaaaaaaaaaaaaagaaaagaaaaaagaaaaaaaaagaaaaatcatacaggccacagagcacctttctgatggggcatgccatacctgtcaggtggaaaacacagggttgagaatcacagaagaaagaatctgagagttaaactgaacagagaacatgtaaaacgaaagggtgtctttgttggtttccatcctctcctctttactgccgaattaacttttggtcccccagaccccttgtttactagaattttatggacgtttaacactgtatggaatgatgtaggctgatgggaagaggacactctgcagggcaacaggacaagtctataaaatccagaatcagattaggagatgaaattctgagcatgattgttggaaaacagagaaaaagagaaggacatcgacaagagaacctgtttactgaacctatggccagtttagtacatctttaagaactgttcactgtaatagttgtctgacttacaaattctacagttatgatatttttataattatgctcttttgtaatcagtttgattgcatacgtgtgaaagtgctctgggagaaaaattcaatatagatgcaaggtatgactaacagcttttgtccaacctgtaatctatcattttccactccctgtagccatatgcacacaaataagagggagatttactcaatggtcataataatttatgggaacaggaatggaactaacacttattaagcatctaggatgtgtcaagtacttgacatacattgtacattatctcatgccatattagaaatttgatttagatactagtatctcaatttataggcaagtaaactgaggctcagagattaagagatttgcccaaggtcacgtagctggtaaatgctacagataggtatgcaggcttcaaagccatgacactgcagtgcctctaagcacttttgcttaaagcaagggttggcagactttttctgtaatgggccaaatagtaaaaattttaggttttgtgggccaagagacaagatggaggatattatgcaggcacttatataaacatttaaaatgtaatcattttaaaatgtaaaaaccatttttaggtgacagctgtgcaataggttggatttggcctgcaggccgtagttgccaactcctggcctaaagtatccagaaaatgtaagcaaaagcaattttggggaggtaaggtgattgtttgaataaataattgtcatcaactttgtattaaatttgcatagtcttttagtaactgagaattcagttttcctcactaattccagtattaaattatcccttcataaaattcttcctgttgatagctatgcatgtttgatgtattttgtctgttagtatgcattgtgtttggcaagatttcataactgcatattttacctcgctctttgaccattctcccagctgttacatacattagagataatgtgtgtatataaagtacatagtattccgcatatggcagatattaaatagtggtagctattataaacattatcagtgttccaaagtattattatattatggatctataatttattattttgttggtattaatatatgttacatatgatataagctgatttctcctcagatcttaaatatttttataactagtctttctgtgtggcacacactactgtccttgtttacagaaattcaatataaatccctagagacttataaaaacaaacaaaaatttcttaaaatcccccaaaacaaaaaaacctcaagttttaaattctgaattaaaagttccagaattaaaattcttcttgaaaaaatgtggcatataaggcattcatgcctttaaataagacataaaattatattcttatccctcattcagtttgacaaatatgtgttacctgtattaaaaagggaagggggaagaagattttggatatgaaagttttgcaaaacataaattctaatcaacatgtttatgaagcaactatgtactgaacatttacaagtactgtacttcatttctagattagtgagctcaatttaagctcaatttaactcaccttccaaatttagccttttctttgggggaaaagaggtttaagtcaaaatataaaggaaaagtataatggttagaagtttcttagctttaggcctttgcagatccatgtaggccaaacctcatacaaaggaatggtgaagggtctttcgtcaaaaattttcttaatttctgtggatcctaaaattcaactataaaatattcagttctttggggttaattgccttcaaaattttttttctccttaaaaagtaaatattaccaggaaaagtaacagttatcatttatttgtagtacaatgtaaattagcttattagttttcttcctgaaaactgagatcctttcccagagcatgtacattttttacagtagaagggtacagggatgggtaattttgaactatgtattactgtctagaatctgcggatttgtgtaggaaagagtgtcacaaagaagaatggagaggaaaaaaggagggagaaaggggagttgggattagaagatactttttggtccttcaccattctgttttaaggcagttcagattttagtgtcctttaaagcaggcaagagttgacagtattcccacattcagtgtttaggaggatgctttcattcatatgtgtggaaatgaaacttttggagttgtcaacaagtcagagaaagcagaagaagccatggaacttgtaatgctctctgcctttttggacaaagctcacctacttcatttttacctcttggtgtctatagtgggtaaagttcatcattataaatagaaaccagaaaacactctcatgagctaagaaccatttacagggtgaaagttaggaaagtgcacttgtttcatgtggatgttttgtgtgagttttgattattactattagaaagtgtggtacacaggtagcccttcagactaacaccaaacatcactccttcatatatatgattttgtatgaaccatatgcattttatagtatgtggatattttctgaaatcaaatggaagaacttttcatttctttagaaatgaaatgttaaaggggaagaaaaatttgttttgttttcagtttaaacacttggatttctgctgggctagaaagatgggatgctgcaaaggtatttcagggtactgtagcattgctgtgattcagggtctgtttataaggcatctgtttattgggatgttcaactgtgtgacctgactttgtgcaaggtgcctctctggctgcccatcaggggacagaccttgtgtacctgctggaaagcagtggagttactttacatagtggacgactcactcacacctagtgggtgctcagaaaatatttgtgaagaggacaaagtggtatatggcatctcctttgatgctttcatataaaaggaagttgcagagagatgactccggggacactattaattttgtcttcacacaatcagtccataatatgcaaagttgtacatactatacatacagtacttaacggggtatcaagtttattctcttagcactgagcaggatgttctgagatgtgcaaaccttttgctaattcatctgtatgatgattaggttactggttggagaaatttcctcaatatggtatactgtgctttgatatcaggtgctaataatttgctgcaaacaggacctagagaattacttttaaagacaaccttttgatctttccagattaaaacatacaaaagaataggttacactcttgtaaggaaaaagcttacagaacttactaactacagctgtctgtgccatagcctggttggtcaggtggcctattgggaagtatataagtgccagtagaactgagttcatatgtctcagaaatagtaattgtttctattacatggataccatatggaccagaatgttcatacagccaggtataagctccacaaagacagagattagtgtttgtctgaggtaccgctgtgccccagtacttagaaaagtacctgacatttataaagcactaccatattgaagaataactagaatttgaaaatatgtggtctgatttactcatctgcattagaaaaatctgttagaataccctgaagtttaaatgtttcttgagatgttgaagtatgttttacattgctatggggataataaattattatttttaaggaaaagcattcaacaaatcaacatataagatgatatctgttttgaaagctcctgaaagattttatgttctttacaaagaattctgggcaaaaggcagctgggtttttatatttacaagatagatgaaaatagttttataataatccaagtgcagagaatgaggagattctaattcaaggggccaaagtatttgttttgatgtctgtacggtattgacataaaataattttggaagcatttccacttgtttctaccatccagttaaatatgtaccaagtaactacctactaagtaacaggtacttggctattgacaagggatacatgtcttgggagcttatagtggaatagaggagacagactcataaatggttaattttagcacatcctaagagctatgatagaagtctgtgtggggactgagaggaaaggcccttagtccagaagtggggttgagagttggggtcaggggaggaagggagggtcaggaaaggctccagaagtgttggatattaagtgagtcttgagtgagtgttgggtattaagtgagcatgagattttggttgaggaagaggagagaagaacagcaagagcaaagtctcagagctgtgggaaactatactcagtttcgtgttactgaaggtaatgaggaagatgaagcttgtgaggaaggcaggacttggacatctgtcattctaagaagactggactccatgctaaaagcagtagagagccactgaaggatttttaaatagtgtagagcaagcttgtccaacctgtggcccatgggctgcatgtggcccaggatggctttgaatgtggcccaacacaaattcataaactctcttaaaacattatgagattcttttgtgatgttttttctttttcttttttcattttcttttcttttcttttttttttttttttagctcttcagctgccattagtgttagtgtattttatgtgtggcccaagacaattcttcttccagtgtggcccagggaagccaaaagattgaacacccctggtgtggaggaattcttagaagaattcctggcattccagcattccattggtatgccgatggcagtctggaggatgggttttaagtgggcaaggctggatgggtgatcatttgcatcaagtaagagataaaggcctgtcttggatagtggaaattagagatggagaagagaggagggtttcagaaccaggtgttcaacaattatgagtccaatctggaacttttgagttgactgataggacattgcctacattcgatccctaaaaattatttaaatctgtacttactaatttatttttaaaaactgtattttctaaaaaaaaaaaaaaaaaaaaaaaaaaacttcatgcaaacagtattgtttcacatctttgcaaatttcttaacatccggttttacagaagacagattttcatatttgcttctgcatttaatttgttgcagttgaccaggtgcaggggtttacgcctgtaatcctagtgacttgggaggctgaggtgggaggatcacttgaagccaggagttccagacaagcctaggcaacacagccagaccccatctctacaaaacatgaaaaataaaaaaaattagccaggcctggtggggcatgcctgtagtcctagctactggggagactgaggtgggaggagagactgagcccaggagttagaggttacaatgagctataatcatgccattgcactccagcctgagtgacagagtgaaaccctgtctcttaaaaaagaaacatgtgtcacaatatcttatgttggtgaaagtataaagaaaatctggtctcatacacaaatgtagttggtaaaggaagaaatagcttaatagtcttttcaggtaatttggatattctaatttaatattataccaaaacaagtggtagttccttaaaggagagatgcaagatggaacctgaaaccatatcaatgaactttttatcttctgatgcattaaaatccattggccacatcttctgatacattaaaatccattggccactttgaatggctctttcacccatgtgtgattttataatgtcttgcattgttcatttggaaattattagttaattgagttatgcaaattttctaaatgttgccacatttcattatataatataaaaaaatcacatttgttaatagcgcatcatcactgggctcatcaaaaaagtcttctagaactaggaagctatcaagctcaaggtgtccaacagaagtttcccaaaattgtaatttttattgaaaaacttgaattttattattggcaacaaatactgttattttccttaacatgacaggctcactttgttcattaaaacacaaaaccaaaccaaaccaaaaactgacaaatacctgagtctgaaacagtttgtcagtcaagtataattggtgttccatgaaaaacagagggcagttcaactcacaactcaaacagtatttgattagaacaaatggcaatgacatactgttcaagctaatagacaagtgcatttccttgagacaattgtcatatttcaggatgcagcacaaacttctatgcatatttcccatcttgccacataaaatattaaaatgatgtatacaagagtcaattaatattgttactgcttcatccaggactttttaggtgaaactggcttttattctttttctttctgcaagtagacagtggtgaagaatacaatgattactagttcattttgttgctgctgccttgatttgttttaaggcaccattagttatacccattgcttttgtaccatcatttcaaatgtaaacacaattgtttcaggataaatgatgagattcgaaaagttattgtacattttgaatgtttcagcattccttgtgtttgttgtcatgcattaaaataaaacacctttgatgactggccggtgctggaaatgaatataaccgaaatagcaagtccagacagtccatagatctatccatttctaaggcaaaagtgcaattttgcagacaaaaccagtttgcagttaagtctttaattcagtgagctgctgcattgttgcaaagtggcagtgctgtgatttcttttgctgacttttcatctagaaaatattcagcaaaataaactctaccaggctttattggtctttcacctatgatgttcatttcttcagccaaagcagtacaataacttatcctgtaagatactggctttttcatctcaagtttgaaaagctgttccaaattgtctttggcttttcaaaagttcattacatctacacttaaaaatccaattctggccgggcacggtggctcacgcctgtaatctcagcactttgggaggctgaggagtgggggatcatgagatcaggagattgagaccatcctggctgacacggtgaaaccccgtctctattaaaaatacaaaaaattagccgggcgtggtggcgggcacctgtaggtccagctacaaagaggctaatgagttcccctaaggnnnnnnnnnnnnnnnnnnnnnnnnnnnnnnnnnnnnnnnnnnnnnnnnnnnnnnnnnnnnnnnnnnnnnnnnnnnnngtcacccaggctggagtgcagttgtatgatcatagcctactgcagccttgacttcttgggctcaagtgatcctcccacttcggcctcccaagtagctgggaccacaggcatgtgccaccatgcccagctaatttttaaattttttattttatgtagagatggggtctcattatattgcccagactggtcttgaacttctgggctcaagcaatacttcctgccatggcctcccaaattgctgggattacaggcgtgagccactgcacccagcccagccctcaattccttttttgaaactctggattattggtctcaagatagtgttacaatgttaattgacaccataaaactaaaaaatgttctattgcataagatacaataaggtaaattattaacatttataaagcctggggaaagatagcgttctcatatttttatttcttctttacagtttcttccagtagctttggattagatttctcccctctatgagttgtcacagaactctctgatgtatcatttcatctttttcagtatctttagatgtagacagtacctctgagcctggagtaaatgaatcctctaatctcgttttttaaagcaaaagatgaggcttcagagtcagttagatgaagatttcaatctcttctttgctttcgatggagcagtgtaactggacaaattctcaaggccccatatttcgtatacagtttttgtgcatcagaaatctcttgagtgtttttgagggttctggttcaaagtgtctcgtaagactatagtcaagatgttggccagagctgcagtcatctgaaggcccgatgtgcagctggagaatctactttcaaagtagctcactcacatggcgggcatattggtgctggctgttggcctcagttgacttttccagacagtgtcctcgtaacatggtggctgtctcccacagcatgagtgttcaaccatatttgattagaacaatggcagcatcctatcattcgacttaatagatcaaactgaatttgtatttcaacatttacataaagcaaagtacatttaaatttttttgtagcgatattaactgtttttgatgtgtatgggagggcttctgggcattgggggttgtggtcttgtcaaacagtactattgctttggcattgcacagaaaacttcgttttgaaacattagtcttttgttgaccatcttggtctagattaagttctccagaggccatgaatttgtggcttgaattttcatatctcatgtaaaatgggaagataattaattaaaacaggaggataattaattttgtaaaaaattactttctacggatttatttgaatgggcatttaaatcctttattatacataaaatattggtgggtagaaaacaaaattcaaatagattttattgagaaactctaatgtattagggttctccagagaaacagaaccaatagggtacatataaatatgtagaaagagatttattatgaaggattggctcacacaattatgcaggccaacaagtcccaccatctgccatccataagctgaagaaccagaagagctggtgatgcagttctaggtcaagcctgaaggcctgagaaccaggtgagctggtggtgtaagtcctagtcagagtctgaaggcccaagaaccaggagtgctgatgtctaagggtaggaaaggatggatgtcccagctcaagaagatagcttcaggctttttgttctattctggccctcagtggattgcagaatgcctgcccgcattggcgaagggggatcttactttactctgtctactgattcaaatgcaaatatctgccagaaacactctcacagacataccccaaaatgatgttgtaccagctgcctgggcatgccttaatccagtcgaattgacacatcaaattaaccatcacactcaacatcttatttggagcatcttttaaatgattttggtttccaaggaattgcaattactgaagtcttgtgttttccacagataaaccaagggatttgttttcttttttattttttaaagttatcaaaaagttggagggagaggcagcaagaagttttagggaaatacacttgtgagaaacaaggaaatacagtcatgcattgcttaacgatgctacattctgagaaatgtgtcgttaagtgattttgtcgttgtttgaacattatggaatgcacttgcacaaacctagatagtctagcctgctagtcacctaggctctgtggtatagtctattgctcctggtctataaacctgcacagcatgttactgtactgaatactgtaggcaactgtaacacagaggtatttgtctatctaaacatatggaaacatagaaaagaaacagtaaaaatatggtattacagtcttacaggaccaccattgtacatggagttcattattgacttaaacatcattttgtggggtatggctgtatttactttggacctacccccaccagggtcttatgccacctactaatactgagtaacaatccaaactcatcgtgtcccccccttcgtcctaaaacccaaacattctgctctgtgatcccttgtgatctggagctggtggccctgttcacctggtcgtggctccaagccatggcctgactggggaccctttcatttctccccccctccaaaagagcgagacctgtgggttctgccctagcaatgctgcccagctctgctttctgtcaatttactttctcctttcccactgtatctgccccagtgcccagtcatttctctcctgggctactgcagtggatcctaatggcctctgggctcctcatcttctctcaactgcttgcagattaattttgcctacctaaaattcatgttttctcaatgtttattaaataaaattccagtgtctcagctgctggaggtgctccacccaaaggcaccaagttatcttttatatttaatgccatcttctcctcttgacaatcgtaaaaggggactatacactctaatatgaaccctctccttaattctttgctcttgttctttctgtaaatgctgtgggccccaatcccacccatcctttaggacctatcttaaatgccaccacccctgcaaagattttcctcctgacctcctttttcctctaccagacctgttgtttctccttttaggtggctcactgaactttgtatccctcgtgttatttaatcataatcggtttatttaaacatagcatgtgtgtacttaaccttatcattcccgcattttttgctagttggacttgaacaaatagttgtataaatccattggaaaaaagtattcaagataggaaaggccaaaattactgtgttagtttatcagatagtgtaaagctatgcagaattttaaaagttatatctacatatactacagcacctacatgtttgtgtattattttgctaagatggctttgttctagtattgaaggatacagaagtgtggcattactttttattcatggctgcacctaaaacattatttgcgtcccagcagataatttgagaacataaaaatgctccaacatctctttcagttcgggatgttgcctaaaaccgtcgacaaacgctatgtttgagaagggaggctacgctggggcgccggaggagacaggcccttaagaaccttccagagatgccttaactgggctaacagctcgccgcgccggggcaggcagaggggtgcggggcgcgctccttccaggacttgccagtccccaagaaccaggccaaccggttccctccactgactcccgcctccctctgcaggcccagccctgcgccgcgcgccctctccccgggcgcccaggcccggcgggggcctagagggcagggatggcccgggcgagggacggggtcccggaggcgggaggcgggaggcgggaggcgggaagcgggaggctggaagccgcgcgctgtcggggtttcccggtgaagggcaggcaaacaaccggtcggtctgggcggagccgggcgggcggggcgagggcggagggcggagggcgcattgcctcatcctgtacattttactggaaatcggacgcatccggaggaggggctgggaggcggcccgggcaccgccaatggccgggccgggcgccggggaggtcggcgagcgctgcggcccgttaaataccctggcagtcccgcgccgcgcccgtactggcccgcgccgtccgcccgccgacagctccctgagccagcccgggaggcagccgcgcgcagcgagccggtggcgcaggtgtcggggtcctcgagcgcccagcctgggagcatgattgtggacaagctgctggacgacagccgcggcggagaggggctgcgggacgcggcgggcggctgcggcctcatgaccagcccgctcaacctgagctacttctacggcgcgtcgccgcccgccgccgccccgggcgcctgcgacgccagctgctcggtcttgggcccctcggcgcccggctcgcccggctccgactcctccgacttctcctctgcctcgtcggtgtcctcctgcggcgccgtggagtcccggtcgagaggcggcgcccgcgccgagcgccagccaggtacccgccggccccgcaccgctgcgtactcggggcgcgcacgcctaggaggttgggagcgggactccccagatggagggtggcccctgcgccctccttagagctaggacgtacgcaccttagccatcaattaccactccccgccttgcccgggccgggcgcctgcctgacctacacgcccttcgccggcccgcggaaccggctccctcccgcgggcctcgggggggcttcagaaaccgctcggccgagctctgactgccgggcgagtgaccaggagatcgctcgctctctaagaagcagctttgttgagtcataattaataaactatgatgagatttggggtctgatgtaggtgtaattttcttcttgtgaatattttagtggaaagctgtagcagaggataagggtttgggaatagcgttaaaggtcatgacttatttctcagtttttatggaatttttcagtaaaaagacttgaccgtcaaagaaaaggaaactgctgttatcaaggtgaagccgggctgaaaaccaactcaagttatgcctttagtttggcgagtttcggaagtctgcccggaatttttgcggtcttgtttttgttgtgtgtgccttaaaaaaaatggataagccatatctagcagagaaagacgtaatgttatctttcatgggctgcgaattggtttcctttcttagtgaaccgagttgcataatttgggggaaaacaggatgcccctgtgggtaggctagaaaaacgcctcgataattgaacgttgagagtaattagcatgattttaaagaacgtctctttccggtgtttcccactcttagccactcctgttttggttgtcatttattttaaaaagtgatatctcattttcattttaagtcatttaaaatcatgcgaaaagcgatttaaaccactgcgtagcagatccagaaagaatatgtgtttaggaccttttcttccccacttggccttcatctggctgaaactgttctgctggtcccttggtttaccacacagccacaggggatttctgaaactgcatttttttctttctgtgacgttggattatgaactgctgtcattccagaaaaatgctgtgttagattctggcaattctggtatctcttgaaatccctaaacttaaaaataaagccaactaatgtttcacttaccctatcattgaactgtttatctcatgtatttatgatagatacagatgttcaaattatgcgttgtttcttgccccatcttatttttgtacacttgatggagcggctgaattattcatttcctgactttgtgaatttgtgttcaacacacatactaagaggttgtgacataatagtgatcagaagtggagtactgtacttgtataccaaatgctaaagtgtatttcaaagtttaaaagtgaaacaagcatatttcctttttacttagaagacctgtgtaagtaattccaaaaacagtcaatgaggggaaatcctgtgtgcatatgtagaaatgtgtttaagctcagtgaatttaagcagcttttttggcacagttgaattgaaggaaataataagacataaatctaagacgttgttaattgtcaggttttcgtacatagagatctttgaaagaagttgttttgtgccttcttaggtaagcggaattgatagactttaaaatttctatgtgaacataaaaccattggtttaaaaagctaaaagtgcatcatttatcacttgctccccaaagtttttccaaagtcaagaataattatagaactatgagagtcaggatggcaaaatctgtcatccattctcatgggtggttagggctgagaaaaaaatgtgatccactctcatgggtggttagagctgagagatagagaggcttaatttgggtttacctattggctctgaggatccttgaccaaatttttatgaactttaatttcttagggtacccagtggagaaaggtatcaggcaacttaggacctttgagcagagctcgggactcacaaggccattgattgaccagagcaagttggaaaggttttgcaatgtgctgcttggggactttatacattaggcaacagctatacttttgggattattaacgtttatgtctgtgaagatatttaaccaggaatatgttttgttttcttttgaacagttgagccccatatgggggttggcaggcagcagagaggcccctttcaaggtgttcgggtaaagaactcagtgaaggaactcctgttgcacatccgaagtcataaacagaaggcttctggccaagctgtggatgattttaaggtgacatctatttttctgttttgagtatagagttggggagaggggttagtctgtcagggttattatgatgacctaggtccagtcatcaagtaagtcacttgaaatttttcataagatgacaaagtccataggacagagaccatatttgtctggtctgttgtatcctccttagcccagtgccagacacctggtaggtgggcaagagaaactcaatgaataaataaatgaaggcaagttcagaggctcaactgaaatggaacattttaactagaaagggaaaaatcaaatggtcttattaatttcatcttgacctgcgttgagctaaggtgaaagtgaaaatgaggaagtcgcaagatagaataaaaattgatatagaaaatcaatattgatagaaaaaccatatcagagatttatggtaagctataaagggtggtagagataagcctacttactgatgtatattaagaggaagtcattttgtatacactaaattggaaacttttttctttatagacacaaggtgtgaacatagaacagttcagaggtaagagttacttgtatttgtaattttttcagggctttggagtaaataatagagtgtaattatgggtaacatttataaaataaaatgatgacagaggctgtattcctttgggtacagaattgaagaacacagtatcatacagtgggaaaaggaaagggcccgattcgttgtctgatggacctgcttgcaaaaggccagctctgttgcattcccaatttttggtaagtatctcaccattttcctctgactatcctttggaaattattcctgggataattttagaaggaagtgagtgtgcaagttgcattttccttctttccagacaccacctcaaacaccaacgcccggggagagcatggaagatgttcatctcaatgaacccaaacaggagagcagtgctgatctgcttcagaacattatcaacattaagaatgaatgcagccccgtttccctgaacacagttcaagttagctggctgaaccccgtggtggtccctcagagctcccccgcagagcagtgtcaggacttccatggagggcaggtcttttctccacctcagaaatgccaaccattccaagtcaggggctcccaacaaatgatagaccaggcttccctgtaccagtattctccacagaaccagcatgtagagcagcagccacactacacccacaaaccaactctggaatacagtccttttcccatacctccccagtcccccgcttatgaaccaaacctctttgatggtccagaatcacagttttgcccaaaccaaagcttagtttcccttcttggtgatcaaagggaatctgagaatattgctaatcccatgcagacttcctccagtgttcagcagcaaaatgatgctcacttgcacagcttcagcatgatgcccagcagcgcctgtgaggccatggtggggcacgagatggcctctgactcttcaaacacttcactgccattctcaaacatgggaaatccaatgaacaccacacagttagggaaatcactttttcagtggcaggtggagcaggaagaaagcaaattggcaaatatttcccaagaccagtttctttcaaaggatgcagatggtgacacgtgagtattcttttatctcatgttcttaattaggtaagccacacttgttggactagtgagcatataatttttctagggtataacaaggtataccttagttagtggttggctaacgaagatgactggtgtagatagaaaccgccactcagtgatagctagtatgtcaagaaagggttttccttcaaaaaattttttggctgaacagataatctgttctaaattgataaaaatatctgtatcttcttgattaattgagtttggaagaccagcgtagactatgtctatagaacagaaacagttagatcatgattagggataaactgtgagttggtttgtagattgatgttaatctgtcctgatgtctttgtggccttgggcaagttatttaacctccttaggtctcagttccttgacgtgtaaaatgataatacctcttgtataggggttttatgagtattaaaaataatagatttaagttgatcagtatggtgcttgacattcttctttttcttatttctgatagcctaacccatcctgttccaactggggtgtattatcaatgtagcagaaaagacaaattatgctttgtaatgtttcatttgagtgtaccaatatataaaaagggggctaaaggaagatttttttttttttttcaaaagaacaacttagtgaaatcagaagtgattcacccgctttcctttccatgttccccaggttccttcatattgctgttgcccaagggagaagggcactttcctatgttcttgcaagaaagatgaatgcacttcacatgctggatattaaagagcacaatggacaggtgaggaccttgacagagtctgaaatggcaaagagggggtcatggtgaagtgaatgatgaccagccttatgtgtagatcatcttagagctcaagatcaagagagtttagttaatattaactttgagatgttgactttttgctaccatcaaccttgaagttattaatgttaactttgtagctgtttgaccaaacactgagagtaataaagccacaccctaggcttactttagtttccttgtcttacagtatctgattgcttattcaaaggatttattttctctctgtgggtttttccctcagtcatagtttagtttcatattccttgttatgataacattgtatgtttaaaatatcttttttcctctggatatccacagagtgcctttcaggtggcagtggctgccaatcagcatctcattgtgcaggatctggtgaacatcggggcacaggtgaacaccacagactgctggggaagaacacctctgcatgtgtgtgctgagaagggccactcccaggtgcttcaggtaagaggcagcaaaccaggcttccatcattgcaaggccagagagatagagttggatattagaagtcggatataggttgcctgttgcaatgatctattttgagttaacttattcatttcttggggattctaataggtatatgcgcagcttatgtagctaacagatgtctgtttttaaaatctgcaggcgattcagaagggagcagtgggaagtaatcagtttgtggatcttgaggcaactaactatgatggtaagcaactgaaactttattagattcagagccacttagggggaaccataaggtctaagggtgctaagtatactaagaaggaaggtaattaaagctaaaatattctgtaggtaaaattagacccaaaaagagacaatattcagattgccttactagttcttgtggagcccatttataggttaagttagaggccatcctcagcatttgtcattatagaaggaccaaaagacctgatgggatgcttgaccactgcttgattatacttttcttctaggcctgactccccttcactgtgcagtcatagcccacaatgctgtggtccatgaactccagagaaatcaacagcctcattcacctgaagttcaggagcttttactgaagaataagagtctggttgataccattaagtgcctaattcaaatgggagcagcggtggaagcgaaggtaaattcacagaaaaggtttaagatggggtaggggagaaactggttatatagcaaaagaccttgcttccaagtacagattcaaacttctttcttttttttctgaaattaatggtgtgagtagcaatgtatgggtggttaagaagcccagaattttttttttttttgagacagagtctcactgtgtcgcccaggctggaatgcagtggtgcgatcttggctcactgcaacctccgactccctggttcaagcgattctcctgcctcagcctgcccagtagctgggactacaggtgcctaccaccacacccagctaattttttgtatttttagtagagacggggtttcaccatgttagccaggatggtctcgatctcctgacctcgtgatctgcccgcctcggcctcccgaagtgctgggattacaggcgtgagccaccgcgcccggccaagaagcccagattttaacagatcatttcatgtgttttcttgatttgctttaaatccatgaattattatccaaaaggtcatttaggtataaaataaatagtctttgaaaggtaaagaaaatgcttgaaattgatattgtcattttggcttccattttcatacactgagaataaaggtagtgctttttgtaaggatttcttcattgttgtaggatgtggaattcatcttctggtttttaagctggaaaatagtttattcttttaaaattttggttttattcactgagtatatgggggaaaaatgcctaagtcataaaccatttggacccttgaggcttactgactagtaaaataggtgagagatatagctaaatataactctacagggaggctaccaaatctggaaatgtaggtgaatacataataaatggtttactgataggttatgacataggatttaaaaatatttatttttctacattttatggccaccctgtataaaaaggtacattgtgacaagaggcatatagacaaattaataggaaatttaagaggaataaaagattccatttagcttgggattaagcaaggcattttggagaagggagcattcaaagtgagtctctgaagctgaatcagacattcaggagactgggtgaaaagtgtattctgaggcatagtatctggatttttttttttttttttcctccctcttgcctttgacaaggatcgcaaaagtggccgcacagccctgcatttggcagctgaagaagcaaatctggaactcattcgcctctttttggagctgcccagttgcctgtcttttgtgaatgcaaaggtacaccagagttggaatggccttctgtacaccctctcaaagtttttgagctcctttcatgaaatttcccccttcctgatgtctgataattcatttctttgtcttcaggcttacaatggcaacactgccctccatgttgctgccagcttgcagtatcggttgacacaattagatgctgtccgcctgttgatgaggaagggagcagacccaagtactcggaacttggagaacgaacagccagtgcatttggttcccgatggccctgtgggagaacaggtgagaggcacaggagggagaggaagtattttttggcactgcagtctgaaacagaaagggagatgaggctgtgcagggcgaaggccagctgttgctcttctggtggactctatcagtgtctgtgtctcacggtagctgtcatagcattgtggagttactcttcgtttggaaacagcaattaagaaatttgagggattatccatagactcaaaatggttagaggtcaggtagtattctgtgacacacacttagggttagagtaagtcagaatggtttaaggttcggaaagagaagataccaaggttcctgcagataccaaggaaagagaatcttagtcttgtaatgtatgagccttcaaatattgtggatattaaatgagttgttacatgtggagtgctcacaatagtcccgggtacagagtaagagatcagtgaacatcaatagttagaattatttctatctatgaagtgatactgaacaaaaaatggaaaaattacttatgtaatttcaaacctagaaatattttgttttaaacagcatatttaatgctttactcatcaaatatggttatatattatcattgagtattgaatagtttcatgagtaaactttttagataacaagaacttattctttcaagaacttaaaatgtttttgatggaactcttttcctgggaggaatgagggggattgtggctgtgggtaggtcattacatactttactaatcacaaaataaaatacgtggaatgcagtttagctttttctttgattctgagctgtcattatgaccataatgttatagtagcccctatttatagagctctttgtaatttagaaagaatatttctatagtttgtaaaaagttttcatgtatatcatttaatagttagaagaactttacaagtttcaagtttcaactgagaaaattgatattcagagaggttccaaggaccagaaccatcattaacttgtaaaaggcagagtcctaagcccagtatttgcttctacttcactgtttgtggtgtgcagtcatataactatgctctcagggatcattgagatattaagccatttaactcttcattaaatgttcccagattatctcctttttgctttggtattttgtgtgtgttgggcaggtagaggctcttttccctggcttttattgtcatactgtggtcgtgtgtttccttctagcagctatcagttgtatcccctaccccaatcgcctttcatctaaattgttgcttctaatctgctggaggctgagagatagaaaataaaatttgtcagactgggatgtaaaatgaatcactctgaatgagccgggatcttttctgtgatccatgaagttacgtgtagatgctttaatacttggatatcatgacagctgttttgacttgaatggtattaaggatttacttgtgtgtgtatcataaaatgtgggttttctgttcctgttagttgaggctgacttcaagataagtgagatattataatatgccttaattactgtcttatgttaaatgttctcacaaatagcaagagtaaagattaggaaaagaatataggtgttaagtttatggagattttcaacttcagataatttttagtggagatgttttactttcttgaactcaaagattattataagagatctgaaataagtttaaaaggagtttagtatttttaaaagtcacctcaaaatcttgagaaatattgtgtgtatttcttcgtatacttacaagttaataggagtagtgtagatggtataagaaaggaatgaaactcagaaggaaatacaccacattggccataagaaataaacctcacaaattttatttgtttctcttccagatccgacgtatcctgaagggaaagtccattcagcagagagctccaccgtattagctccattagcttggagcctggctagcaacactcactgtcagttaggcagtcctgatgtatctgtacatagaccatttgccttatattggcaaatgtaagttgtttctatgaaacaaacatatttagttcactattatatagtgggttatattaaaagaaaagaagaaaaatatctaatttctcttggcagatttgcatatttcatacccaggtatctgggatctagacatctgaatttgatctcaatggtaacattgccttcaattaacagtagcttttgagtaggaaaggactttgatttgtggcacaaaacattattaatatagctattgacagtttcaaagcaggtaaattgtaaatgtttctttaagaaaaagcatgtgaaaggaaaaaggtaaatacagcattgaggcttcatttggccttagtccctgggagttactggcgttggacaggcttcagtcattggactagatgaaaggtgtccatggttagaatttgatctttgcaaactgtatataattgttatttttgtccttaaaaatattgtacatacttggttgttaacatggtcatatttgaaatgtataagtccataaaatagaaaagaacaagtgaattgttgctatttaaaaaaattttacaattcttactaaggagtttttattgtgtaatcactaagtctttgtagataaagcagatggggagttacggagttgttcctttactggctgaaagatatattcgaattgtaaagatgctttttctcatgcattgaaattatacattatttgtagggaattgcatgcttttttttttttttctcccgagacagggtcttgctctggcgcccaggctggagtacagtggcatgatcttggctcacttcagccttgacttgggctcaagtgatcctcctacctgagccttctgagtaactgggactacaggtgtgcactcctcgcctggctaattttttattttttgtacaggcaggatcttgccaccttgcccaggctggtcttgaactcctgagctcatgccatctgcctgccttagtctcccaaaatgctgggattacaggagtgagccaccatgcccggctggcagttgcatggaagagaacacctctttatggcttaccctctagaatttctaatttatgtgttctgttgaaatttttgtttttttacctttattgaaacaacaaaaagtcagtattgaaacatatcttcctgttttctgttgtcaaatgatgataatgtgccatgatgttttatatatatcattcagaaaaagttttattttttaataacattctattaacattattttgcttgccgctggcatgcctgaggaatgtatttggctttgattacacactaagtttttgtaataaatttgactcattaaaaaccttttttttttaaaaaaaaaaaaaaagaaaatctcattagtgaacttatctttgcagctgagtacttaaattctttttaaaaagataccctttggattgatcacattgtttgacccagtatgtcttgtagacacgttagttataatcaccttgtatctctaaatatggtgtgatatgaaccagtccattcacattggaaaaactgatggttttaaataaactaattcactaatattatttgtcttacatgcattttcttttcctagtgccttatttccctagatagaaaaagtactattgatgattttaaatacctttgagttagttaatttatgttaatttgggttttttggagaacatgtttcctgaaagtatacaagatttaacatcaaaatctatttgctaagtttactaggagaagtctgttaggttttgaaattatcatggaagtttaatagatgctgtcgatcattcacatgtttagatgcttaaaaaaaaaaaaaaaagctaagtgggagcagtgaatcataggaataacagtttggagattaccaggatcatccttagagagatgtaaacctgggaaaggttcttccctttgccagcaagccattttgacgtgtgagaacaaacacatcaatatctgtcagtatgttgttacaattattgcacatatattctagttcttacagctgttttgagaatctggtgaaagctatgaatcctttccctggaaaatgcaaatatatgtatacacacaaatgctgtgtgcaatatttggggcttcacaacctttagaagaccatgactcacaagaatccactttagtttcatttctgcacatacttttcttctttcgtataacaaaatcttgggtaatttgctttgcaaatgcaacttgttaaccagaacagcagaaatgatgtactcccactgaacatagccctacagtgagctttacccaagtgagcttctatgttctctcttaatcccaaattctctcatagttgaaccagtatctagcaagtatgtttgtgtgtgcgtgtgtgtgtgtgcaaagatgtaaataatttgaggctaagacatataagacatttcttagccttaagatgtttacgtgagagacatggcatgtactttattaggtaaactatgttaaatagcatttaaaaagagattcagaagggacatttctttctgactggggaggattcaaggtagagcatttgaactgtatcttctgaatagttgatttggatgttcatataaagggaggagaggcagatgaaagaaacaaacagcatgaaccaaagcataggcgtctgtgggaatagcaggtgattttaatatagttagttagactctggaagtggccaataaggttcatcttgtgttccacctctgactggtaatatttttgagtatcaagttgagaaagatcctcaggctcgtaggggcttcaggagaaggttgctggattgaaccttcaggagaggttgctgtgattggtgcgtgatatctgccacaggaatatgggaaatggctcttgattgaatacatcttaaagcctcacagaagccaagactgtgtgctcattgctgcaacttcagtgcctagcacagtgcctggcacatggaaatagttcataaaatattggttgaatgaacgaatatatgccaatcctggttagagtcactggttttgttgggggaggtgatgttttgagccagagttatactattaattactaatgaattattggctatcatggttctgaatttaattctgccacatgatttcacagtgacatggatgatatgttaatgaaaatgggcatgggcatagttggactcattaaggaaaaaaatcaggcagtctgtctttgcaaaggactgttagtgctgtagtttgatattgactaaggaatccctacaagagtcagagaccaaatcttccagctcaatttgttagtcaaatcagtaacatttaatatcctttctatatttttacttaatcaggacaggaaaatttcctcaaatgtctctgacttttaacaaatgtcaacttaaacatacgaccactaacttccattttctgataacctcagttgttctgtattgaatacgacctcagagagaaatcagcttcagtcactggctaagtttgtgatggttcctctgagatcaggcctgggtacaaggtttgagattacttgtaaccatgctactaggttttggctatacctgctggtgccctggattaatccttgagagaaggggagacactgccttattagtcatcagaggccctgcacctagcacagtatctgacacattgtagacattcaataaatagttcctaagttgaatttaatttcaacactttgtaaaaattttttttcttggcatattttattcttcagtgtataaatatttttattatctacatacagtttatgacttaatccagtacttttatgcttcaagcctttggagtctgtgcagacccagaaacattgcatgggtggcacatttctaggaggggtaagattggttgtttttgtttgtgtgtgtgtttgttttttttgagacggagtctcgctctgtcgcccaggctggagtcagtggcaagatcttggcccactgcggcctccacctcccaggttcaagcaattcttgtgcctcagcctcctgagtagctgaaattacaggcacgcaccaccacacctggctaatgtttttgtatttttaatagagatggggtttcaccatgttggccaggctggtctcgaacttctggtctcaactgatctgcccacctcagcctcccaaagtgctgggattacaggcatgagccatcacgcccagctgattgtagattcctctcaaaatgtgtcttgctttttcctttgtactccttgtcctctggcctgttgtccctgctctctccatcacaccattccccttgcctgtcagctcaagagggtttgggggtgagatagtgcagctgctgagtgccctaggttcaaagtttcagtctttggtcgacattagtatcttatgtgaagcttgttaaacatgcaaatacttaggccccaccccaggtttcctgaatcagaatctccaggattttcagggcttctggcagattatatgtggtgattctaatgcagttttagtctaaattaattaggaaatgcagactttggagagtagctgtggttgggcagtagccatatggtggtaacagaatgggtttctggaatgcgtatggggatgaagtggcaactgatgaagatgtgcagtgtgccaggcacgttggatcctatggtatagaaactagctttgaagatacaatcatgagtcaccttatttttttttcctgctttcagaaatcacttttctaaggtgattctggtgtttaagtttctcaagtatattagtttcctaggactgtctaacaaataaccacaaacttcgtggcttaactcggagaaattcattttgtcatagttctggaggccagaattctgaaaccaaggtgttggcagaaccatgtgccctccaaaggctctaggtggaattcatgccttctattccagcttctagtgactccaggtgttccctgccttgtggcaatataactccagtgtctgctccatctccacatggccttctcctccctgtgcctcctctctgtatatctcttacaaggactcttaccactgaatttaggggccacctgagtaatccaggatgacctcatctcaattttatttatttatttatttttgagggggagtgtgcaatggtgccatcttggctcactacaacctccacctcctggattcaagtagcctcccgagtagctgggattacaggcatgcaccaccacacctggctaattttgtatttttaatagggacggggtttcaccatgttggtcaggctggtctcgaactcctggcctcagattatccgcccactttggcctcccaaagtgctgggattacaggtgtaagccacggcacccgacctttttttttttttttttttgagacggagtctaactctgtcaccgaggctggagtacagtggcacgatctcagttcactgcaacctctgcctcccaggttcaagcaatcctcctgcctcagcctcccaagttgctgggattacaagcgtgctccaccatgtccagctaatttttgtatttttagtaaagacgaggtttcatcattttggccatgacggtctcgaactcctgacctcaagtgatctgtctgcctcggcctcccaaagttctgggattataggcatgagccaccacgcccggcctcagtattctaaattgtacaaagactttttttccaaatgaggtcacattcacaggttctgaggattaggatgtggacatatctttgggcagccttaacttaaaacttactacaccaggaaagaggatttataataatttctgttatcattatttctcttaaaaaatgagtaagattaatatttccttttttaaaaaatcattttatcatggtaagaacattctattttcttacgaaattgtaaagtgtacaataatagggacaatgttgtacaatagatctctagaacttatgaatatttctttctgagcaatcctatagcctgtcttcagaatctatggtatcttttacatattattattgatctaatgtatggtaaaatatctctatttcatttattagctataatactaaacattgaccaggcaactcatttaccattgataaactttaagagaaacaaaaatatttattgagctgtaactaaaaaattatgataatgattaaaagagctttaagtatcctaaacttccaacaaagcttttataattgtctcttgtcattttgctccctggtacacatgtgaatgaatctgctgctcttcaccttggatcacactacctagagctgtgtgagaagcaacatgatcccaaatcaaattaaaatcctatgctttacggcatctgatcttggaatgataacagtagaggagttagtcactgaaaactgcaaatgtttaaaagtcaagggtcaaatccagtttcatacaataacaattgattccactttgctaaaactcaattgaaatagactgttttaactctagatattatctttttaagtgataggattctggcttttgctccagaaataaagatttcagcagctctgggaacttggtagttggatccagcatgtgtttacctgttggatcagcatagttcctgtaggcttgacaatcgggacaaatttcagattgtgaaacaacactagattccttagcttaattgatctggggtttaagtttcaaattactatttatttttattaactcaattcatggtatcttaattcacatggcctgctctccctatttgcagccaaacatctctcaggtagtactttaatttcaagtgattgtgtaagactgtagggtacttcctgattggccttcgtggaagccccaggtgtcgactggtctggaggcgaactgctattttcttccagcactctagggttagttttggtgtttgcctcagtgggagtgtgtccagtgagagtctgcttttctgaattggtgccagaggtgttttttttttttacattagatatcatttttcttttgtctttaaaaaaggtatccttttctttttgctcccaagaagtattccttccagaatattttaaaattttcaaaaaattctcctttttaggctctcacagatatggaagaattggtcgtcttcaggatagcaattttgtctggtgtaacttcttacaccaggaaattcaaaatatatcatttgggatatatttgaatatatcccaatatatattttgaaaaatatatcaaaggaaaattcaaaatatatcatttgggaaaacaagtaagcatttggatggtgcctctactcaaaatattcctggaaaatttttttaaagataaatttttagccaggtgtggtggcacatgcctgtagtgtctgctacttggaggctgaggtgggaggactgtttgggcctccagtgttccgggctgcagtgagccatccatgatcctgccaatgtggtgtaataagaagatgtatagacagaagtttaatttacacaggttattaatttctatacacattctaatcatacaggctaatgaggtacgtcatttaaagtgcaggatttatagacagctgacaagtttttcttttatgacattattctatttccctatctatataaatcaatcagttttgtttcttccctcagctaaagttatatcaaatttgttatcaaggtcaaaatgtctattaatcagttaatagggtagctaaaaaaagtctgttaattttttttttttctattttctccgccaccacccacatctaggttttcaaggctttattcttggattaccacaatagacaggaacctgactttttattatggaaacattcaaacacacatacaagtaggcagaatagtatattgaacacatacatctatcatgaaacttcatcaattataaacattttgccatttttgtttcctcttgcccccatattttgttctagaataagttaaagcccactccaagcattatagattgtcagtaagagtcgctaacagataagtaacttgtgtccccagtaaatagctttctaattattcttcctccaatcttcctgcttttcttaccaatctcaaaatttccactacttggcatactgttaaagaaacagagaaagtttttcaaaggctcaatgctgcctgttgaatcagatgcaaactcttgtcctggtttacaaagctatgttgaccttagcttgaccctgcctgtctaatctcatctcatttttccccagtgggctatcaggtgggtctcttcactgtatcagctgatgctctgtttattcctgtctcttgtcatgtcctcacctccccaaattctgtgcatcctagaaagccctgcttgggtgccactttctctattaagctttttccagctcttactgactgctcctttccctgaactcctgggattaaaacacaattcctctaactttcatatctggtattttctgtcatattccagacttaattattgcaatcaggaaagtgagctctgaatctgaattttctcttccttgcttccttttttcctttcttccaacccttctctctcctctctccttccttccttccttctctttctttcctttctttctgctcccctgtccccctccccctccccttcttccctccctctcccctcccctctctttgtcacactctatcatccaggctggagtgcagtgcatgatcatagctcactgcagctttgacctcccggggtcaagtgattctccctcctcagcctcctgagtagctgggactacaggtgcacactaccatgcccggctaatttattcttgttgtaaagatgggggtctcactatattgcccaggccagactcctggcctcaaccaatgctcccttttcagcctcccaaagtgctgagattacaggtgtgtgccactgcagcatttactttttaaatacaactttaaaatgtctgggtgagtggtatttttgaggacacgaagaaggtgagtggtgctggatagaatctagcattggaatcgtaggcagaattctaagatggtcctagggctatctttgcctcagatgttactcctgtgattctgttaggttacattgcaaaagtgattttgcaaaggtaaataaagtaattattaaccagctgaccttaagatagggaaactactcatctaatcacacgggccctttaaaagcggagtgttttctttggctggaggcagaagaggaaatcttagagattccaagcctgagaaggactcaacccgcaattactggctttgaggatggagcaagggggcaatgagccaaggaatacaggtattttgtaaatatccaaacagaaaatggaatctcaggcctacatccacagggaattgacttctgccaacaacctgattaagcttagaagcagattcttgctcagagcctccagataagagcccagccctgctgacaccttgagtttggcgttgtgttacttcatgcagagtcaagccaaccccgcccagactctgacctgctgaactgtgagataacacatgggtggtgttctgagctgctaaatttaggggtaatttgttacacagcaatagaaagttaatacaatatataacacagggtttgagcttatagtgcaattttatgcatttcctgctattttaattaaggctccaaatcagcaagagaggttttccaataaatgggggcactggtcttaggatgtgtggtcattacacaggctagcagtgtctttagtttatgatatctcacttttgtccagcacttccccattccagatgggaaaatttctttttttctttttctttttttttttttttttgagacggcgtctcgccctgtcactcaggctggagtgcagtgacatgatcgcggctcactgcaacctccacatcctgggttcaagcaattcttctgcctcagcctccctagtagccggaaccacacgtgcatgccaccatgcccggctaatttttgtagtttttagtagagatggtgtttcatcaagttggccaggctgatcttgaactcctgacctcgtgatccacctgccttggcctcccaaagtgctgggattacaggcatgagccaccgtgcccggcctggaaaatttcaaggaaaggaaagtgtagcttccctattgccagtgttttcaaaagaatctataaaagggtcctggagcaggagaaggtgattaggacagcatatctgaccagtagtagcatcagcttactgtgttgccagactctagccatttacctctactgtgagaggggggcatattttgtagggcagcggtctccaacctttttggcccagggaccagtttcatggaagacagtttttccatggatgggctgtgggtgggtggatgatttcaggatgaaactgttccacctcagatcatcaggcattagattcacataaggaggacacaacctagattccttgcatgcacagttcacaatagggttcacggttctgtgagaatctaatgccagaggctgatctgacaggaggcagaggtcaggcggtaatgctggctcgcccatcgctggtaccggttcatggcgctggagttggggaaccctgctgtagggaaagaaccccttagctctgcagcagccacgatttcagatggtacaacttgtttaaaataaatagacacactcacttcagagactggtcaagaaatagttgccgagagctcttggaaccaagatgagaacttacattacagtttcttctgcagcctaggatcacagatgacgggcaggggctttattagtttaaccggcatctatttctccagtcgtgcacacagaaatgaatgaatgattagacattcatttggggtgcctttgtgtgattcataaataacttgttccttataaaatttattgctgaatgactcattaaagaattatgatgaagataataaggctcctaatttaaagggttatgcaagtgttcttttaaaaatcaactttgcgaggtgtaattaatgcataaattttaagtgtacagtttaacaaatgtatacacctatgtaaccaccacccagtcaagatacagaacatttttgacatcccagaaatttccttcatgcccctttgcagtcaatctctccttccacacagctattgatctgatttctattatattattgtagattagtttttgcctcttcaaaaacgtcgtataaatagaatcatacagtctgtactattttcttattttctgggtttctttcactcagcatgatttttttttttttttttttttttgagacggagtctcgctctgtcgcccaggctggagttcagtggcgcgatctcggctcacagcaagctccgcgtcccgggttcacgccatttttctgcctcagcctcccgagtagctgggactgcaggcgccggccaccatgcctgcctaatttttttttttttttgtatttttagtagagacgggtttcaccctgttagctaggatggtctctatctcctgacctcgtgatccacctgccttggcctcccaaagtgctgggattacaggcatgagctaccgcgcccggcctctgcatgatatttttgagattaatccacattggtgcattgatcactaaagtatatttctattgctgagtagaattccattgcactaataacacaatttgttaaccattcacatattagtgggcatttcgattgtttccagtttgggactattattgaataaagttgatatgaacagtatttgtgtggacatatgttctcatttaattttaaattcttaggagtgaagtacctggttcatataag

SEQ ID NO: 77 - DNA, 4135 bp, Homo sapiens
gagccggtggcgcaggtgtcggggtcctcgagcgcccagcctgggagcatgattgtggacaagctgctggacgacagccgcggcggagaggggctgcgggacgcggcgggcggctgcggcctcatgaccagcccgctcaacctgagctacttctacggcgcgtcgccgcccgccgccgccccgggcgcctgcgacgccagctgctcggtcttgggcccctcggcgcccggctcgcccggctccgactcctccgacttctcctctgcctcgtcggtgtcctcctgcggcgccgtggagtcccggtcgagaggcggcgcccgcgccgagcgccagccagttgagccccatatgggggttggcaggcagcagagaggcccctttcaaggtgttcgggtaaagaactcagtgaaggaactcctgttgcacatccgaagtcataaacagaaggcttctggccaagctgtggatgattttaagacacaaggtgtgaacatagaacagttcagagaattgaagaacacagtatcatacagtgggaaaaggaaagggcccgattcgttgtctgatggacctgcttgcaaaaggccagctctgttgcattcccaatttttgacaccacctcaaacaccaacgcccggggagagcatggaagatgttcatctcaatgaacccaaacaggagagcagtgctgatctgcttcagaacattatcaacattaagaatgaatgcagccccgtttccctgaacacagttcaagttagctggctgaaccccgtggtggtccctcagagctcccccgcagagcagtgtcaggacttccatggagggcaggtcttttctccacctcagaaatgccaaccattccaagtcaggggctcccaacaaatgatagaccaggcttccctgtaccagtattctccacagaaccagcatgtagagcagcagccacactacacccacaaaccaactctggaatacagtccttttcccatacctccccagtcccccgcttatgaaccaaacctctttgatggtccagaatcacagttttgcccaaaccaaagcttagtttcccttcttggtgatcaaagggaatctgagaatattgctaatcccatgcagacttcctccagtgttcagcagcaaaatgatgctcacttgcacagcttcagcatgatgcccagcagcgcctgtgaggccatggtggggcacgagatggcctctgactcttcaaacacttcactgccattctcaaacatgggaaatccaatgaacaccacacagttagggaaatcactttttcagtggcaggtggagcaggaagaaagcaaattggcaaatatttcccaagaccagtttctttcaaaggatgcagatggtgacacgttccttcatattgctgttgcccaagggagaagggcactttcctatgttcttgcaagaaagatgaatgcacttcacatgctggatattaaagagcacaatggacagagtgcctttcaggtggcagtggctgccaatcagcatctcattgtgcaggatctggtgaacatcggggcacaggtgaacaccacagactgctggggaagaacacctctgcatgtgtgtgctgagaagggccactcccaggtgcttcaggcgattcagaagggagcagtgggaagtaatcagtttgtggatcttgaggcaactaactatgatggcctgactccccttcactgtgcagtcatagcccacaatgctgtggtccatgaactccagagaaatcaacagcctcattcacctgaagttcaggagcttttactgaagaataagagtctggttgataccattaagtgcctaattcaaatgggagcagcggtggaagcgaaggatcgcaaaagtggccgcacagccctgcatttggcagctgaagaagcaaatctggaactcattcgcctctttttggagctgcccagttgcctgtcttttgtgaatgcaaaggcttacaatggcaacactgccctccatgttgctgccagcttgcagtatcggttgacacaattagatgctgtccgcctgttgatgaggaagggagcagacccaagtactcggaacttggagaacgaacagccagtgcatttggttcccgatggccctgtgggagaacagatccgacgtatcctgaagggaaagtccattcagcagagagctccaccgtattagctccattagcttggagcctggctagcaacactcactgtcagttaggcagtcctgatgtatctgtacatagaccatttgccttatattggcaaatgtaagttgtttctatgaaacaaacatatttagttcactattatatagtgggttatattaaaagaaaagaagaaaaatatctaatttctcttggcagatttgcatatttcatacccaggtatctgggatctagacatctgaatttgatctcaatggtaacattgccttcaattaacagtagcttttgagtaggaaaggactttgatttgtggcacaaaacattattaatatagctattgacagtttcaaagcaggtaaattgtaaatgtttctttaagaaaaagcatgtgaaaggaaaaaggtaaatacagcattgaggcttcatttggccttagtccctgggagttactggcgttggacaggcttcagtcattggactagatgaaaggtgtccatggttagaatttgatctttgcaaactgtatataattgttatttttgtccttaaaaatattgtacatacttggttgttaacatggtcatatttgaaatgtataagtccataaaatagaaaagaacaagtgaattgttgctatttaaaaaaattttacaattcttactaaggagtttttattgtgtaatcactaagtctttgtagataaagcagatggggagttacggagttgttcctttactggctgaaagatatattcgaattgtaaagatgctttttctcatgcattgaaattatacattatttgtagggaattgcatgcttttttttttttttctcccgagacagggtcttgctctggcgcccaggctggagtacagtggcatgatcttggctcacttcagccttgacttgggctcaagtgatcctcctacctgagccttctgagtaactgggactacaggtgtgcactcctcgcctggctaattttttattttttgtacaggcaggatcttgccaccttgcccaggctggtcttgaactcctgagctcatgccatctgcctgccttagtctcccaaaatgctgggattacaggagtgagccaccatgcccggctggcagttgcatggaagagaacacctctttatggcttaccctctagaatttctaatttatgtgttctgttgaaatttttgtttttttacctttattgaaacaacaaaaagtcagtattgaaacatatcttcctgttttctgttgtcaaatgatgataatgtgccatgatgttttatatatatcattcagaaaaagttttattttttaataacattctattaacattattttgcttgccgctggcatgcctgaggaatgtatttggctttgattacacactaagtttttgtaataaatttgactcattaaaaaccttttttttttaaaaaaaaaaaaaaagaaaatctcattagtgaacttatctttgcagctgagtacttaaattctttttaaaaagataccctttggattgatcacattgtttgacccagtatgtcttgtagacacgttagttataatcaccttgtatctctaaatatggtgtgatatgaaccagtccattcacattggaaaaactgatggttttaaataaactaattcactaatattatttgtcttacatgcattttcttttcctagtgccttatttccctagatagaaaaagtactattgatgattttaaatacctttgagttagttaatttatgttaatttgggttttttggagaacatgtttcctgaaagtatacaagatttaacatcaaaatctatttgctaagtttactaggagaagtctgttaggttttgaaattatcatggaagtttaatagatgctgtcgatcattcacatgtttagatgcttaaaaaaaaaaaaaaaagctaagt

SEQ ID NO: 78 - protein, 716 aa, Homo sapiens
MIVDKLLDDSRGGEGLRDAAGGCGLMTSPLNLSYFYGDPAAAPGACDASCSVLGPSAPGSPGSDSSDFSSASSVSSCGAVESRSRGGARAERQPVEPHMGVGRQQRGPFQGVRVKNSVKELLLHIRSHKQKASGQAVDDFKTQGVNIEQFRELKNTVSYSGKRKGPDSLSDGPACKRPALLHSQFLTPPQTPTPGESMEDVHLNEPKQESSADLLQNIINIKNECSPVSLNTVQVSWLNPVVVPQSSPAEQCQDFHGGQVFSPPQKCQPFQVRGSQQMIDQASLYQYSPQNQHVEQQPHYTHKPTLEYSPFPIPPQSPAYEPNLFDGPESQFCPNQSLVSLLGDQRESENIANPMQTSSSVQQQNDAHLHSFSMMPSSACEAMVGHEMASDSSNTSLPFSNMGNPMNTTQLGKSLFQWQVEQEESKLANISQDQFLSKDADGDTFLHIAVAQGRRALSYVLARKMNALHMLDIKEHNGQSAFQVAVAANQHLIVQDLVNIGAQVNTTDCWGRTPLHVCAEKGHSQVLQAIQKGAVGSNQFVDLEATNYDGLTPLHCAVIAHNAVVHELQRNQQPHSPEVQELLLKNKSLVDTIKCLIQMGAAVEAKDRKSGRTALHLAAEEANLELIRLFLELPSCLSFVNAKAYNGNTALHVAASLQYRLTQLDAVRLLMRKGADPSTRNLENEQPVHLVPDGPVGEQIRRILKGKSIQQRAPPY

SEQ ID NO: 79 - DNA, 4065 bp, Homo sapiens
  misc_feature (1)...(4065): n = A,T,C or G
humancdngsunchrusdnggcgagttcttagagaaaaaggctgcttagctgctgcttatcatgtaacctcaaaaggaaactgatcgtctttctcatgctgtcacgtacttgggttattatcgctgattacagctggaaacaattgatttgctcttacgtatttgtgtgacttgactcttcaaacacaaaggttaacaggaagatctcgagggccctggctgaacttcaccttttggctttcttggcctgatgctgaactctcgaggttgagccccatatgggggttggcaggcagcagagaggcccctttcaaggtgttcgggtaaagaactcagtgaaggaactcctgttgcacatccgaagtcataaacagaaggcttctggccaagctgtggatgattttaagacacaaggtgtgaacatagaacagttcagagaattgaagaacacagtatcatacagtgggaaaaggaaagggcccgattcgttgtctgatggacctgcttgcaaaaggccagctctgttgcattcccaatttttgacaccacctcaaacaccaacgcccggggagagcatggaagatgttcatctcaatgaacccaaacaggagagcagtgctgatctgcttcagaacattatcaacattaagaatgaatgcagccccgtttccctgaacacagttcaagttagctggctgaaccccgtggtggtccctcagagctcccccgcagagcagtgtcaggacttccatggagggcaggtcttttctccacctcagaaatgccaaccattccaagtcaggggctcccaacaaatgatagaccaggcttccctgtaccagtattctccacagaaccagcatgtagagcagcagccacactacacccacaaaccaactctggaatacagtccttttcccatacctccccagtcccccgcttatgaaccaaacctctttgatggtccagaatcacagttttgcccaaaccaaagcttagtttcccttcttggtgatcaaagggaatctgagaatattgctaatcccatgcagacttcctccagtgttcagcagcaaaatgatgctcacttgcacagcttcagcatgatgcccagcagcgcctgtgaggccatggtggggcacgagatggcctctgactcttcaaacacttcactgccattctcaaacatgggaaatccaatgaacaccacacagttagggaaatcactttttcagtggcaggtggagcaggaagaaagcaaattggcaaatatttcccaagaccagtttctttcaaaggatgcagatggtgacacgttccttcatattgctgttgcccaagggagaagggcactttcctatgttcttgcaagaaagatgaatgcacttcacatgctggatattaaagagcacaatggacagagtgcctttcaggtggcagtggctgccaatcagcatctcattgtgcaggatctggtgaacatcggggcacaggtgaacaccacagactgctggggaagaacacctctgcatgtgtgtgctgagaagggccactcccaggtgcttcaggcgattcagaagggagcagtgggaagtaatcagtttgtggatcttgaggcaactaactatgatggcctgactccccttcactgtgcagtcatagcccacaatgctgtggtccatgaactccagagaaatcaacagcctcattcacctgaagttcaggagcttttactgaagaataagagtctggttgataccattaagtgcctaattcaaatgggagcagcggtggaagcgaaggatcgcaaaagtggccgcacagccctgcatttggcagctgaagaagcaaatctggaactcattcgcctctttttggagctgcccagttgcctgtcttttgtgaatgcaaaggcttacaatggcaacactgccctccatgttgctgccagcttgcagtatcggttgacacaattagatgctgtccgcctgttgatgaggaagggagcagacccaagtactcggaacttggagaacgaacagccagtgcatttggttcccgatggccctgtgggagaacagatccgacgtatcctgaagggaaagtccattcagcagagagctccaccgtattagctccattagcttggagcctggctagcaacactcactgtcagttaggcagtcctgatgtatctgtacatagaccatttgccttatattggcaaatgtaagttgtttctatgaaacaaacatatttagttcactattatatagtgggttatattaaaagaaaagaagaaaaatatctaatttctcttggcagatttgcatatttcatacccaggtatctgggatctagacatctgaatttgatctcaatggtaacattgccttcaattaacagtagcttttgagtaggaaaggactttgatttgtggcacaaaacattattaatatagctattgacagtttcaaagcaggtaaattgtaaatgtttctttaagaaaaagcatgtgaaaggaaaaaggtaaatacagcattgaggcttcatttggccttagtccctgggagttactggcgttggacaggcttcagtcattggactagatgaaaggtgtccatggttagaatttgatctttgcaaactgtatataattgttatttttgtccttaaaaatattgtacatacttggttgttaacatggtcatatttgaaatgtataagtccataaaatagaaaagaacaagtgaattgttgctatttaaaaaaattttacaattcttactaaggagtttttattgtgtaatcactaagtctttgtagataaagcagatggggagttacggagttgttcctttactggctgaaagatatattcgaattgtaaagatgctttttctcatgcattgaaattatacattatttgtagggaattgcatgcttttttttttttttctcccgagacagggtcttgctctggcgcccaggctggagtacagtggcatgatcttggctcacttcagccttgacttgggctcaagtgatcctcctacctgagccttctgagtaactgggactacaggtgtgcactcctcgcctggctaattttttattttttgtacaggcaggatcttgccaccttgcccaggctggtcttgaactcctgagctcatgccatctgcctgccttagtctcccaaaatgctgggattacaggagtgagccaccatgcccggctggcagttgcatggaagagaacacctctttatggcttaccctctagaatttctaatttatgtgttctgttgaaatttttgtttttttacctttattgaaacaacaaaaagtcagtattgaaacatatcttcctgttttctgttgtcaaatgatgataatgtgccatgatgttttatatatatcattcagaaaaagttttattttttaataacattctattaacattattttgcttgccgctggcatgcctgaggaatgtatttggctttgattacacactaagtttttgtaataaatttgactcattaaaaaccttttttttttaaaaaaaaaaaaaaagaaaatctcattagtgaacttatctttgcagctgagtacttaaattctttttaaaaagataccctttggattgatcacattgtttgacccagtatgtcttgtagacacgttagttataatcaccttgtatctctaaatatggtgtgatatgaaccagtccattcacattggaaaaactgatggttttaaataaactaattcactaatattatttgtcttacatgcattttcttttcctagtgccttatttccctagatagaaaaagtactattgatgattttaaatacctttgagttagttaatttatgttaatttgggttttttggagaacatgtttcctgaaagtatacaagatttaacatcaaaatctatttgctaagtttactaggagaagtctgttaggttttgaaattatcatggaagtttaatagatgctgtcgatcattcacatgtttagatgcttaaaaaaaaaaaaaaaagctaagt

SEQ ID NO: 80 - protein, 618 aa, Homo sapiens
MGVGRQQRGPFQGVRVKNSVKELLLHIRSHKQKASGQAVDDFKTQGVNIEQFRELKNTVSYSGKRKGPDSLSDGPACKRPALLHSQFLTPPQTPTPGESMEDVHLNEPKQESSADLLQNIINIKNECSPVSLNTVQVSWLNPVVVPQSSPAEQCQDFHGGQVFSPPQKCQPFQVRGSQQMIDQASLYQYSPQNQHVEQQPHYTHKPTLEYSPFPIPPQSPAYEPNLFDGPESQFCPNQSLVSLLGDQRESENIANPMQTSSSVQQQNDAHLHSFSMMPSSACEAMVGHEMASDSSNTSLPFSNMGNPMNTTQLGKSLFQWQVEQEESKLANISQDQFLSKDADGDTFLHIAVAQGRRALSYVLARKMNALHMLDIKEHNGQSAFQVAVAANQHLIVQDLVNIGAQVNTTDCWGRTPLHVCAEKGHSQVLQAIQKGAVGSNQFVDLEATNYDGLTPLHCAVIAHNAVVHELQRNQQPHSPEVQELLLKNKSLVDTIKCLIQMGAAVEAKDRKSGRTALHLAAEEANLELIRLFLELPSCLSFVNAKAYNGNTALHVAASLQYRLTQLDAVRLLMRKGADPSTRNLENEQPVHLVPDGPVGEQIRRILKGKSIQQRAPPY

SEQ ID NO: 81 - DNA, 101438 bp, Mus musculus
  misc_feature (1)...(101438): n = A,T,C or G
tggcctctgtatcagctcctgcttcctgatctgcttgagttccagtcatgacttcctttggtgatgaacagcaacgtggaagtgtaagctaaataaaccctttcctccccaactgcttcttggtcatgatgtttatgcaggaatagaaaccctgactaagacaccgggtgtgcttaagagctagtgctgtgttggttgtcactctgggatactcagtcaaggtctcaactccccatcaatttcaaagtgttcagatcaaagaacacccgtgttgaactggggaactaaagaagactcatactgtcagaattgcctgcaattgtcctcaacgtttgccgtatgctgactctggcaatcttgcgactatttcctgcaataaatgaaaagccatgccatttctgtgaagaaggcacaggctgttttccctccaggcctgacgcaagcctgaaatagagaagtttacggctgaagcagctgcaggaaagaacaagtcaggaaggcagtgtgtgcagagttgtcttcttaaggaaacaacggtggctaagcccttttcatttcccctgtaaataagcagatgtcagggtacagggtgatttgactgtgtagcagccaatggatgctctctttgcttccctggaaaaaggaaaagagaccccccccccacacacacacacaatcagccagctgaccacctttataaacagtgctgtctctctggaacactctgcagatgcttgggaaagctataaaacaaccacggctgcttgcttcagcacctgtgggtgcagcctgagacacaactattccaagcagcctacacggggttttgtctgcactcattgctcagacctaagggaggcacagctgagggattgctgtgtctggtagaaaaggaacaatgctatgattattgttaaacatggatctttgtctgcacaaacatctgcagtgattgccacaaacacccccccccccctttcagactacagcagcaaactgttcagctatctcagtaagcctgttaggtgatagcctccattacaggaggcattacagccttctttggcggtgcaacattgggcctgacacaaggtttacttacagtgggataaactgggcctcaaaatgaagcaagcagcagagtgccaagagagtcaggctgtgagctttacaaaggagtggaacccagcggctggcaggcagagccgagagaggggcagccagcggctggcaggcagagccgagagaggggcagccagcggctggcaggcagagccgagagaggggcagccagcggctggcaggcagagccgagagaggggcagccagcggctggcaggcagagccgagaggtgcagcatgctcagaagcactggtgagctgcagaagagaagaggcatctccgttggctgctgctggtagcaccttccaggtggccataaccatggcagcagccatagcaacaagaagctgctacagtttgagggggagaggggcagaagtggaaagaatggggaatgggcagattgaagctgaaatggagccaataagataaaaatgagagtgcaagagcttagaatagtacagaaatagcagaattgttaaagaaatgcccattcggacaaacaacatctgttagcatcaagtatctccagagaattcagttacaaagtgaaggagtctaataagcaattgtcctgtctaataagcaattcagggacaaaaatggagcagagaatgaaggaatggctagccaataaccagcccaacttgaaacctatcccaagagcaagcacaaatccctgacattattgatattctgttgtgcttgcagaaaggagcctaatatagctgtcctctgaaaggctccacccagcagctgactaagacaggtagagacaccctcagacaaacagtggatggagtttggggactcttatggaagatttgggggaagaattgaggaccccaaaggggatagggactccacaggaagaccaacagagtcaaactaaactggacccttggggacttccagagactgagccaccaaccaaagagcatacccgagctggactgtgtatgcccccccccccatatgtagcaaatgtgcagcttggtcttcttgtgggtcccgaacaactgaggcgggggaggggaggctatcagaaagctgtagcctgtctgtggaaaatgttcttctagctgggctgccttgtctggcctcggtgggagaggagatgtctctaaccctgcagagtcttgatgcagcagggtgggggatagcaagtggaggcctaccttctcagagaagggagaagggaaagggaaagggaatgggaggagggactctggctggggaagcggggtgggcagcatttgggatgtaaaataaaatggagtcttcagtcttcagagctgtgagcacactgctgtggatactgtgtttccatctctacctctctaacacacacacacacacacacacacacacacacccatcttgctgagatgtgtactggctcccctccctcttctgctttaaacatctgttgaaaccttggtatgaaggtaatggacccaggcggccgctgctccctctccaaggcagagctgtttctacagcttttgtgttccggtggccagctgatgtaaagatggcccaaaggtttgatttaaagctcatcaaaaacttgtttcctcgttcttcattgtcaccacctttcctcacaagagggacaaaactttgatgtagtgatgtaagaaggatatggagtgaggtatgccaggtgtcctgatcgtttctttagatccagcactagggaagctctcggagtttgcctccatcctggtctatatggtgagttccaggatagttaaggctgtccagtaacaacttcacacacacatacacacacactcaaacacaaatacaaacactcatacacacaatgacacacacacacacacacatagtcatacacacatacaaacaaacacatatacacacacagacacacacatactcacacacatagtcatgcacatgcgcgcacgcacacacacacacacacacacacacacacacaaacatatatacaaacactcaggcacacacatacaagcacacactctcaaacacatactcatacacacacagagtctcacacacacacagacatacttacacacatactcatacatacacacacagacacacttacacacatattcatacacacacagagtctcacacacacagagacacatttacacacatactcacacacagagtctcacacacacacagacacacttacacatatactcatacacacacagagtctcacacacacagagacacacttacacacatactcatacacacacagagtctcacacacacagacacacttacacacatacacagagtctcacacacacacagacacacttacacacatacttaaacacatagagtctcacacacagacacacttacacatatactcacacacacacacacagagtcacacccatcagaatgagttttatgttttggtttcaaacctattaaaacaaagacaaaataatatttaatttttttagagtaactataagaaacatataaaaaagtttcttaggaaaaactgtgttacaaatagtaaattataggttcttgccataattcactttttgtaataatgtgtctattctctaaagaaatcatctgttggggctggtgagatggctcagtgggtaagagcacccgactgctcttccgaaggtctggagttcaaatcccagcaaccacatggtggctcacaaccacccgtgatgagatctgatgccctcttctggtgcgtctgaagacagctacagtgtacttacatataataaataaataaatctttaaaaaaaaaaaaaaagaaatcatctgttaaacaaaaaggaaaaaagtcatctgtactctcccattgacatgtaatttatgacagatacaagtaacattacctaattctgaaaatcagactcttgagtgtacatcttaagaaatacttatggatgggtaagggtaagccaaataaagcaccactccccctcctcctcnnnnnnnnnnnnnnnnnnnntagagtaactataagaaacatataaaaaagtttcttaggaaaaactgtgttacaaatagtaaattataggttcttgccataattcactttttgtaataatgtgtctattctctaaagaaatcatctgttaaacaaaaaggaaaaaagtcatctgtactctcccattgacatgtaatttatgacagatacaagtaacattacctaattctgaaaatcagactcttgagtgtacatcttaagaaatacttatggatgggtaagggtaagccaaataaagcaccactccccctcctcctcctcctcctcctcctcctcctcctcctcctcctcttcttctgtttgtttttttttttcaagacagggtttctctgtgtagccttggctgtcctggaactcactctgtagaccaggctggcctcgaactcagagatccacctgcctctgcctcttcagtgctgggattaaaagtgtgcgccaccacgcttggcgcgtttctcttctaatattgttgttggttgtgttataatagcaagagagacaaaactacagtgctaagtatatatttctcatgcacacacacacatccacaatctctgtgtgtgcatgatgtgtgtggtggtgaaagcatgtgccataccatgcacgtggagggcagaggacaacttcacagagtagcttccttcctttctgtgaattcaggtgacctagggcaggaactcaagccgttagtcatattatatccgcagtcgggaccaagtacagaataaatgcatcctagcttgagaaatgcctcagctcaatgagctttcctcactttcctaccgttcgaagctcagcccgtgaaatggtgtgacctgaagggcaggtcattcctacaggaactaacagcatcaagactaacctccacaagcctgcccaacctccatctagataactccccttctctcagatggtcccaggtgtgccatttacagctgcccatcacatagagtatacaccgcttggcatcagaggctaaccaaccactcttggactaggtaagactctttgaagaaaaaaatgaataggaatgagtggattttaggaaaggtaaattcagagagggatttagtggtgacgatgagaaatgtaatcctggaccactaacaacacactgtgtttcgatgacagccctcagccatacctctaacacaattgtaattcacaaacgcaagagcgtcatactataaacgctatctaaggtgtgatcacaggccccaaatgggtaagtaaccatttagacattgacaggtaaagatttttgttaacttatacgatgaacatccgatctagcttcttggctaaagatagctgtattatgccccatgtgagtttatcaagttggccacatgtccacaccatctacttagtatcctctaccccaaggacaaatgacttgcattctttttagtgatgtggggtggggtgggggagcagttccgcaaaagccagagcaaaattggaattctccacacgtgttccatattctgaattgcttggattatttttctttagaaatgggaatgtgatacataaagagggtgagtatactgggaagagaagttagacctggaggagaggacaggagtaaacttttcagaataatcagacatgaatggcttagaagttatgaaggatgaaacaacggagctgcatccatcatagatgtggcaggtgaggtagcagggagagtcatttgtttagatattttgggcaaatggatgtgagggccatcctctgtgggaggaacctgaggccttcatgaggcatgcaggtcaagatgtctatggtcagttgagtgctcatgtcaggaccatgttgtgagtgactctcctccaagccaagcaaacaacatcttggggagtttggctgtgttcctgtgtaaaagtaccctacctgggcttgttggctgtttaccttcccacatgaagggactggggaagctcagaagccccctgcaccccacctgagtatctcctctgcctcaattctgcatagcctctgtggcctctgagagaggctggggaggtttacactggagaggagagctccatatgttctgctacagtaaagccctcgaccctgctggctttccaggtatgaccttttcgtggtaagagcatacacagacccataacaaccctccccctaccgatgcgctgcaaggaatccacagctgggtgagcttcggtgagatcgtgccttggtgtgttcggaaccccaggaggaggggtagatactgcttatgtctccactttcgaaggactttcagtaacagcttgacaagaccactttcagagagagcgaagtgacaggctgtttgttattattatttttttatttccatagtgctaaatttaagaatttaagtgaggctttgtgaccccaggggaggggaggactcgtgtctaaatatcctcgacaatcacattctgtactttgtaactgagatggtgagctagcctgcctaggcaaactggtgtctggaggttccatagtatctgatgtctgtactgcaggagggttggatatttggaaggtttagaagcttgtactttcatatagtactcagtatctatataatgaagtcttggggttatctcacactggagcaaactcaaacggtgtgtatggcgggacattcctgtagatccacagtgttcactgctgtttgtcagtatggggttatagagagtaacacaagtagggaagcagtcactgaaatcatcggtgcgaataacgtcacggagagaataaactgagaagagtgccaagaatggaattctgggaaacaccagtgtctaagatacagaaaaagaacattaatggtgttcaagcctgcaggactggacaaatataaaattaggctgagtgacatttgcattctgtcctttgactgagacaaatatttcagaatgacattggacaagtttttctgttataggttgttgttgttgttgtttttaagattattttttatgtatgtgaatacactgttgctgtcttcagacacaccagaagcggacatcagatctcaattacaggtggttttgagccatcatgtggttgctgggatttgaactcaggaaactctggaagagcagacagtgctcttaaccactgagccttctggctcattgttaaagagataaaagtgtagggacctagtggcaactgtcggttgcagggggagaggtgctattttctttggcagttgtacctactggaaagtagcccatgctgcagaaataatctcttatccatgctcatgcaagcaatcttcaactcagtgacacacacacatgcatacacatatgcacgcttgcacaaacaagcacacacttaagcacacaaatatgcacatatgtgcacgcatgcacaaataagcacaaacatatgcacacacatgcacatgtgcacacatatgcgcacatgcacacaaacaagcacacatgtgcatacatacacaatatgaaaattagaggaaacttcttaggaaggagagtttcagcatagggaggaggaatgggagaatgagatagtaatgaagatgggagttattacaacctactatacacacatacgaagctgacaaaaataagtaaactaatcaaaatattcttaaaaggtaccaggagaacaggctgacttcccatttttcaatgtgaagagggaacatcaagaaaaaaagaatttcactgattattatgtttggacaccacagaagaactgtgtgagtgatgacctgtaatgagcccttattttttttattttttatttttttgagcctttattttctaacatcactttgaagcacacgtctttcctctcagctctggagaggcagaggcagaggcagaggcagaggcagaggcagaggcagaggcagaggcagaggcagaggcagaggcagaggcagaggcagaggcagaggcagaggcagaggcagaggcagaggcagaggcagaggcagaggaggcagaggcaaaggcagaggcagagaggcagaggcagaggcaggcagagctctgtgagtctgaggctggcctggtctacctagtgagttttaggacatccagagctacacagtgagaccctgtctcaaagaaaacaaaacaaaacaacaacaacaacaaaagcaaaacaaaatttcaacttgaattcctcaactctacaaaggtgtcaaagatgaaagaaaattattttcagtaagttgtgccaaagctatctataataaacccaaaacattgtgttagaatctgtgttagtagcccagttattagatcatttcagaaaacttcaaaatacagctcccaactcaaagaaagtaagacctaatctgttctgtagcccaacatgaaggaccaaggctcaggaagacagattcaggttgcccccaaacaccaccatccaacacagtagcattttcataaagtttttataacaaagcaaagactcccttaaggcatttgacaaatgcattagagcaggggttctcagccttcctaacgctgccaccatttaacacagttcctcatgttgtgctgactcccaaccagaaaattatcttcaatactacttcgtaactgtaatcttgctactgttatgaacaatagcataaatatctgacggtcttaggccacccacccctgtgaaagggtagttccactcagaggttgagaacatcaggtaggtgagttacagcaaaactggaaactttctgtcacgcccctcagggactatctgatagtgatcgcctttgagtcattggaagttaggaatctgatggcacattccaaaaaaaaaaaaaaaaaaaaaaaaaaaaaaaaaaaatgacaagggtgttaggtcaaacacagagatgacagtaagtggatacctgggggcaaaagataaccaagatagttagattctagacttgcaacattccatcttcccataatcaagacgttccaatcagtctcacagacatagcttaacacagacatagcttcctcctcttccaacttcaatccacacaggctggctttgctcatccgaacaatacgctgaaattatttctgcttcctgcttattacaacagagaaatgtcttgggcaaaaatagactcacctggaacatcgaaaaagctcacgttagtttttgccttacatttatttggcacttctgatctaatgaattggttccttatttgagcgtcaattacctagtatgttctaggtatacagtcagggaggtgggtgggtggggcggggagataacaaaaacaaagcaaaataaaaacataaaagggatctgtcggtggaaggcggggagggggcggggagcaggaggagtcttgttaacagataaggaaaatcagggacgactccgcagttaaataaaccaaagtcagtcgatttggataactccgcaggattgtcgtttaggttccccaggccggggaggtaggagcaagacgctgatttgtgttttaagtcaggggggtggggatcaaggaggcagaagtgacggacaagacaaattcattttttaaaaaaagcaaatatttatagcagaagagaatggatcacaaacagacgtagggagacacctccgatcatccccaggttaccagccagccaaaaaaaacaggacgcgcctgcgcagctgtgccggccacctgcgtcgacggcgggggcggggtccgcactgcccagctggagctcgttctgggcttctcgctcggccccgcccctccagagactcgcctccggattggcccgggcgggggcggggcccggagtccggaagtgcggctgacgtgtccgggccgcgctcggaattgtgggcgactgggctaatggcgtcggcgggtctgggcacccggggcgggcatcgctgaagcttgtggccagctcggccggtgacgcccgccgtggccaggccccgcggcagcgggagggacctgcccgtctggtgggctcctgagccggcgccggtggagcctggtggggctgcaccgctgcgggcaggtttcggcgagcggccggcggcggtgcggggcggcccggggggaactcgggcacgcctcgggagacgcagcccggctccggccgtgcgcccgcccgcccgcccgcccgccgagccctgggccccggctaaggaagactgaggagccgccggctggctgcgggccgcgcaagctgctgacagtgcctgcttggtagtgctggtcccagatcggcggtgacctggagggaccatgtcctgcaccaacagccccgaggctgtgaagaagctgctggagaatatgcagagcgacctgcgggccttgtcactagaatgcaagaagaagttcccacctgtcaaggaggtaggtcccaggcgacgtcaggggcgggggggggggaacgtcacgagcgctccctggtcctcgtagaccgctttcctcgattccccaacacctatactaattttcattccgccagttaagtttggtgattgcccagcaaaggctgttcgtagaattcttttgagagttccaaggagatttgatttcttccattctcttgttatgtttatttcggagcgaagttccatgagtgagccggtttggtgacactcgagtcaggtatattgctcctaagaatgagtatccaccgctgtagcggaatccgttctccatacttaggtgggcatagtgtgtgggaacatttccttcttgtctgtgttattcagcccacctaaaaatctaatcgtcgtgataaactagagccccaaattacagcaaatggtcaaggcctacgataaccatgttaagccctgcacaagcagtattctagtaggatgctttgcaaaacaaatatatctgagtatatatagcctcttgggtgcataatttgttgttgttgttgttgttgttgttgttgtttttcagctgtagaatagctgaaaattgtggtaccagtataggagaccgggtgtggtagccaaacttttagctccaatactcagatgcgagtggatctctgtgagttagagagtggacaccaggacaaccagggtacataaagagaccttgtttccaaaaccgatggtggtgatggtgatgatgactggggctcacaggacgagtatcagggagctcaatgtatgctaataaaattttccagatattgaattgaaaaattgagtttagtcactaatgcctgacttttttcttttaagattccatttttgttgaaatattttaaaaactgccctttcacatttttaaactattgtagttcaggggtcaggctcggcagttaagagcacttgctgctcttccagaagtcccttgttcaattcccagcacctacatggtggctcacaatcttgtgtaattccagtttcaagggatctgacctctttcttctggtctccaaagacaccaggcacacatgtggtgtgcaggcatacctacaagcaaaacacccatacaaatataacaaaaatgaatacatctaaaaaaaaactttaaaaatagtgtagttcaaagatatgtaaaaatagttaattttatttcctagttaatatagcttacttagtatacctgaaattttatcatactacttgctattaaatgttacagagtgagttcatatttttctacttacaactatctttatgaatactgtaagaagttttataattagaacttgactagtaaagtttagaatgcagacttgtcaggaatcttgaaattttccatgagtgccttgcttttacctgtttgttccagttacctttagtcccagcacttgggaggcagaggcaggtggatttctgagttcaacgccagtctggtctacaaagtgagttccaggacagccagggctacacagagaaaccctgtctcgaaaaacaaaacaaaaaaaaaaaaaaaaacaaaaaaaaaaaaaaaagaaaaaaaaaaaaagaaaaaaaaaaaagaaaaaagaaaacatcaaatcctactgtcatttcagcagtaatttatagagctgtggctgttcccagtcctagtgaatcatgttaagagctgtggctcctctgtgctattggcttctgtgctttaaccttggaatttaattgatatcgtctgtggtatttttattgggaaaaaccactcttccagcaggtaagttacaaagttctagaactcaccacattcctagtcctggagctctcatggcagctccttagtttctcctagatcactgcctagacagctacttggtaattgcttccagcctttgcagtgatggcaagcatcattctcctgattgtctctaatacaccatctcgtttatgctgcatgttccataaggatttgctgagtgagagtcttcctggggcttgacagatggctcaatggttaagagcactggctgttcttccagaggacctgggttgattcccagcacccatatggtgctctaaactctgtaactcgaattgaaaaggaccggatgccctcatccggccttcactggcaccgggcacatgagatccacatacaggcagacttacactgtcacacctggtgataagcaccactactacagagccatccctgcaggccccatctccctttcttgatatcaccacaaagcataaataacaattagtggttccaggctgtgtactttcaaggttttctgttattatctggcgccgtggcagagtttttgcctaaatcagaagttccccatggcagagcttttgttctgtgttaattggtggctgctgaagacctggtgacagaatgccttgtattgccacagcagggttctctgtccttttattagggatctgaggcgaaggttcttgcctctgtgtgtggattcagagttcattttcaggacagtgaagaagagaggctggctaatctagctgtgcttagttgaaagctgttttagtgtagaagtttataatgtagttatttcctctatgagggtggtctttctctcacaagtaaaatagtataaattcctgtcttatgttttgaaatcataatagagacaaatacataagtatttgcattgtattgattacttcatggcattgtgctttgatcacatagaaataaagacactgtgtatgacttcaaatcatctttagtctttttctctctttctccaaggtagcttacttttaaccaagaacaaagcaaatttgtgctactagttagtccagaccaccttattaatctcttaagaataaaacatggaaaaaaagtaacaaaaatagaaactatctttctcttcatgaaatgagtttgattgaataaaatataacatttacaacagtgtaggaaactttgcatcttttaacatgccactttaaatattttatagtgaggcacacctagaacctagcacttagaaggctgaggcaggaagatctcaagttctataccagactgagctatatcacaagactctgtctcataagaaaaagaaggcaggcatagtatcacccacagcacttgggaggcagaagtggtcaggtttctgagtttgaggccagcttgatctacatagtttaaggctggcctgggctacatagtaagacactgtctcaaagaagacgagagtgaactaaatcagtacttcatccacacgtgaggagctccagagggttcagtaagatggcaaagctggaatgggaaggggctgcatgtgaccccctgtgtacccatctgtaagtctcctcttctcatagtggcatcctgcagatgcctcgctgttaccattgcctgtctacatcattacttaggctattgactgttccttccctctgacactttctcattttgagatttgtagcacactgtgagtgtgtctcctctctcaggagtcctgttgttcatgtgtgatcgtatcctggtttgtctccaaggctttcctcatgttcttccctgcttgctgccactcccctgacctttggccttaatgtgatgccagtggctttatctgtgtcatccactctggtttccgtcagcctgtgtaacacctaccaggatatctcccacatagttcagatagacttcttgtcactgaaccacctctgtgttagtatgccctagtcctttgtcttgttatggttacatcatttgcttatgttactgtgtaaggctgccttggctctcctgctgcttcctgtccttactagctttctttttcttccctattttctcatgtactatcctacactgggttttaacatcatacctgacttttgatgagtatcaaggaaataagtaaattagcactattggttgctaccatgtgatcattaagtttcttaggatagcactcatacctgcttgatccccaacttctctggcgacctcatcctcacacactttacctaagcagcaatcatacattagtcttcaacatgcctggcttccccctttcatgcttcggatcctagtttaccattggctccctctgccccacatttagaatagggtcttgtattaactcagccccgagttcttcccagcccatttatcatgaagtgagtcccaggtgctttcactcccccctttgtctgtctgtccatccgcccatccgtccatccatctatccatccatctgtgagattatctgtgaacacctaactgtgtgccaactgcaagctggctgctgagtaaaacctcctgtccaggcttccaagcttgtctgtctagtgtgctctctgctaaagccaaaccaaatcagaccagaccagacaaaccaaaccgacccaaaaaacctttctcttaatctttttgcatgttattttttgttgttgttgtttctttctttctttttttcttttcttttcttttttgtttgtttttcaagacaggatctctctgtatagcccttggctgtcctggaactcactctgtagaccaggctggccttgaactcagaagtccacctgtctctgcctcccaagtgctgggactaaaggcatgcgccaccactgcctggcataaactattttctttatctcttacattttaccttctgttgtacttttgagtttttcctgcttttttttttttgtaaggattactattgcatcacatctaatccagccactgtagcataaaactgtatacctggaacttatgaaccagagcctttattgaagtttaaagttggaagaaaaggctgggaaagagaaaggcgtactgtatggatattagccatttctctgcaccctgcattccagccttccattactgactaaagaaagtgtatttcttggaaaccatgagtttggaataaaatgtcatgtggtagttgaaactataattgtaggataattgaatgttacagaatatttttttttggtttcaattgtaattgttttatgagcatattgtcctttaaggggtgttctgagtccttttagcactctcaagtgtgtatttgactttagctcttagcatttgcctgacatgtaaaaagtcttcaaggcatccccatacttcctttgtgtctcttgaatacattatattatctgagttgaaaataagttaaatttcagttttctttaatttccatttcactgctgtgctctatgaataattaattaggatttttgttttaactttagattatttttctcatgagctgcaaaggatatatttgttaaaagcagaagcatgagtttttatgaaaggaagcaacatttaaaaccagttgttagtttttgtttttaaagcagtcccatgtaccccaggctggccttgaacttatttttgggtgaagctggccttgaactcctgaatctcctgcttccttcacccaccggttgggatgatagacacgtgccaccattcccaatttataagcattaaagaaatgtaatctgtagtagttctagtgatgggcatgtccattcattctgtagcatacattatttcccttccttcattggtaatctgcattcttcacccagaaccctctggatgtagatgaactaatttaattctacctactgagtgctttgttggcttaatctagttctactctccaccttgtggctggagaggtggctcattggttaagaatacttattgctcctatagagaactcaggtttggtttccagcacccacatggcagttcccacccagccataagtccagttccagagtatccaacaccatcttctgacttctgtaggtattgagcatgtgcatggtgcacacacatacatgcaggcacaacactcatacacatttaaaaagaaatccccagaggagaggtgtccgcccggcccgggagggaattaccagagcatctgcaggagatatcccggttcacggactccaccgagactagtctgcacaggtgagagtgtgaactacagaagctaacagcttctgggacaggcaggagccacagagcttctgaggcagcccccttttcgggctccagacatcagggcaccttccctgccagaggagaagtgtccgcccggcccagaagggctttgcctgagcatcttcaggagacatcttgattcccggactccaccgagactactcttcacaggtgagagtgtagactacagaagctaacagcttctgggacaggtcctgttttgggccttcatcttctgccaggagggaagtctgaacgacagatatctgtgcaccttccctgaaagaggagagcctgcctgcagagagtgctctgaccactgaaactcaggagagagctagtctccccagtctgctggtagagaataacagaatcatgagaggaacaagctctaaccagagacaactataacaactgactccagagtttaccagatggcgaaaggcagacgtacgaatcttactaacagaaaccaagaccactcaccatcataggaaccgagcactcccacctcagtcagtccagggcaccccaacacaccggaaaacctagacctggatttaaaggcatatctcatgatgatggtagaagacatcaagaaggtctttaataactcacttaaagaaatacaggagaacactgctaaagagttgcaggtccttatagaaaaacaggaaaacacatccaaacaggtgatggaaatgaacaaaaccatattagacctaaaaagggaaatagacacaataaagaaaacccaaagtgagacaacgctggagatagaaaccctaggaaagaaatctggaaccatagatgcaagcattagcaacagaataaaagagatagaagagagaatctcaggtgcagaagattccatagagaacattggcacaacaatcaatgaaaatgcaaaatgcaaaaagatcctaactcaaaacatccaggaaatccaggacaccaatgagaagaccaaacctacggataatagtagatgagaatgaagatttttcaactcaaagggccagcaaatatcttcaacaaaattatagaagaaaacttcccaagcctaaagaaagagatgcccatgaacatacaagaagcttacagaactccaaatgactggaccagaaaagaaattcctcctgacacataataatcagaacaacaaatgcactaaatgacgatagaatattaaaagcagtaagggaaaaaggtcaagtaacatataaaggcaagcctatcagaattacaccagatttttcaccagagactatgaaagccagaagatcctggacagatgttatacagacactaagagaacacaaatgacagcccaggctactatacccagccaaactttcaattaccgtagatggagaaaccaaagtattccacaacagaaccaaattcacacattatctttccacgaatccagcccttcaaaggataataacagaaaaaaaccaatacaaggacggaaatcacgccctagaacaagcaagaaaataatccttcaacaaacctaaaagaagacagccacaagaacagaaagccaattttaacaacaaaaataataggaagcaacaattacttttccttgatatctcttaatatcaatggactcaactccccaataaaaagacatagactaacagactggctacacaagcaggaccgaacattttgctgcttataggaaacccatctcagggaaaaagacagacactacctcagaatgaaaggctggaaaacaattttccaagcaaatggtctgaagaaacaagctggagtagccattctaatatctaataaaatcgacttccaacccaaagtcatcaaaaaaagacaaggaggggcacttcatactcatcagaggtaaaatcttccaagaggaaccctcaattctgaatatctatgctccaaatacaagggcaaccacatcattaaagaaactttagtaaagctcaaagcacgcattgcgcctcacacaataatagtgggagacttcaacacaccactttcaccaatggacagatcatggaaacagaaactaaacaggaacacagtgaaactaacagaagttatgaaacaaatggatctaacatatctacagaacattttatcctaaaacaaaaggatataccttcttctcagcacctcatggtaccttctccaaaattgaccacataattggtcacaaaacaagcctcaacagatacaaaaatattgaaattgtcccatgcattctatcagatcaccatggactaaggctgatcttcaataacaaaataaataatagaaagccaacattcatgtggaaactgaacaacactcttctcaatgataccttggtcaaggaaggagtaaagaaagaaattaaggactttttagagtttaatgaaaatgaagccacaacgtacccaaacttatgggacacaatgaaagcatttctaagaggaaaactcatagctctgagtgcctccaaaaagaagctagagagagcacacactagcagcttgacaacacacctaaaatctctaaaacaaaaggaagcaaattcacccaagaggagtagacggcaggaaataatcaaactcaggggggaaaccaaccaagtggaaacaaaaagaactattcaaagaatcaaccaaaggaggagctggttctttgagaaaatcaacaagatagataaacccttagccagactcactagatggcacagggaaagcatcctaattaaacaaaatcagaaatgaaaagggagacataacaacagatcctgaagaaatccaaaacaccatcagatccttctacaaaaggctatactcaacaaaactggagaacctggatgaaatggacaagtttctagacagataccaggtaccaagttaaatcaagatcaggttaatgatctaaacagtcctacatcccctaaagaaatagaagcagtcattaatagtctcccaaccaaaaaaagcccaggaccagatgggtttagtgcagagttctatcagaccttcaaagaagatctaatcccagttcttcacaaactattccacaaaatagaagcagaaggtactctacccaactcattctatgaagccacaattactctgatacctaaaccacaaaaagacccaacaaagatagagaacttcagaccaatttcccttatgaatattgaagcaaaaatactcaataaagttctcgctaaccgaatccaagaacacatcaaaacaatcatccatcctgaccaagtaggtttcatcccagggatgcagggatggttcaatatacggaaatccatcaacataatccagtatataaacaaactcaaagacaaaaaccacatgatcatctcgttagatgcggagaaagcatttgacaaaattccaacacccattcatgataaaagtcttggaaagatcaggaattcaaggcccatacctaaacatgataaaagcaatctacagcaaaccagtagccaacatcaaagtaaatggtgagaagctggaagcaatcccactaaaatcagggactagatgaggctgcccactttctccctacctattcaacattgtacttgaagtcctagccagagcaatttgacaacagaaggagatcaaggggatacaaattggaaaggaagaagtcaaatatcactttttgcagatgatatgatagtatatataagtgaccctaaaaattccaccagagaactcctaagcctgataaacagcttcaatgaagtatataaaattaactcaaacaagtcaatggcctttctgtacactagggataaacaggctgagaaagaaattagggaaacaacacccttctcaatagtcacaaataccttggcgtgactctaaggaagtgaaagatctgtatgataagaacttcaagtttctgaggaaagaaattaaagaagatctcagaagatggaaagatctcccatgcttatggattggcaggatcaatatagtaaaaatggctatcttgccaaaagcaatctacagattcaatgcaatccccatcaaaattccaattcaattcttcaacaaatttaaagggcaatctgcaaattcatctggaataacaaaaaacctaggatagcaaaaactctgctcaaggataaaaaaacacctctgggggaatcaccatgcctaaagctgtactacagagcaattgtgataaaaactgcatggtactggtatagtgacagacaagtagaccaatggaatagaattgaagacccagaaatgaacccacacacctatggtcacttgatcttcgaccagggagcaaaaaccgtccagtggaaaaaagacagcattttcaacaaatggtgctggcacaactggtggttatcatgtagaagaatgcgaattgagccattcctatctccttgtactaaggtcaaatctaagtggattaaggaactccacataaaaccagagacactgaaatttatagaggagaaattagggaaaagcctcgaagatatgggtacaggggaaaaattcctgaatagaacagcaatggcttgtgctgtaagatcgagaatcgataaatgggacctcataaagttgcaaagcttctgcaaggcaaaagacaccgttaataagacaaaaaggccaccaacagattggcaaaggatctttacctatcctaaatcagataggggactaatatccaatatatataaagaactcaagaaggtggactccagaaaatcaaataaccccattaaaaaatggggctcagagctaaacaaataattctcacctgaggaataccgaatggctgagaagcacctgaaaaaaatattcaacatccttaatcatcagggaaatgcaaatcaaaacaaccctgagattccacctcacagcagtcagaatggctgagatcaaaaattcaggtgacagcagatgctggtgaggatgtggagaaagaggaacactcctccattgttggtgggattgcaagcttgtacaaccactctggaaatcagtctggcggttcctcagaaaattggacatagtgttaacagtggatccctcaatacctctcctgggcatatatccagaagatgttccaaccggtaagaaggacacatgctccactatgttcatagcagccttatttataatagccagaagctggaaagaacccagaagcccctcaacatatgaatggatacagaaaatgtggtacatttacacaatggagtactactcagctattaaaaagaatgagtttatgaaattcctaggcaaatggatggacctggaggacatcatcctgagtgaggtaacccaatcacaaaagaactcatacaatatgtactcactgataagtgtatattagcccagaaattagaatacccaagatataagataaaatttgctaaacacatgaaactcaagaagaatgaagaccaaagtgtggacactttgccccttcttagaattgggaacaaaacactcatggaaggagttacagagacaaagtttggagctgagacgaaagaatggaccatctagggactgccatacccggggaaccatcccataatcagcttccaaacgctgacaccattgcatacactagcaagattttgctgaaagaacccagatatagctgtctcttgtgagactatgccggggactaacaaacacagaagtggatgctcacagtcagctattggatggatcacagggcccccaatggaggagctagagaaagtacccaaggagttgggggatctgcaaccctataggtggaacaacaatatgaactaaccagtatcccccggagctcttgactctagcttcatatgtattggaagatggcctactcgcccatcagtggaaagaacggcccattggttgtgcaaactttatatgcctcaatacaggggaatgtcagggccaagatgtgggtgtgggtgggtgggggagcgtgagggggactttttggatagcattggaaatgtaaatgaattaaatacctaattaaaaaaaaaagaaaaaaaaaagaaatcccatctctcccctctacctcacaacataaagcatacacctagttaaaaataaaaaaataaaaaggcttccaggtcaaaatctactgaaagactcggctttctgtctagttagtgccataggaatgctggggtgttgaataagtgcagctatttttgttgccaagattgaaggcagaaccaacacaagtatgacagagaagtagacaatagctctagtagatttgtgaatctgtggatcagagttcttgggattttttttttcttttcatgaggcacctctctgttaagtgagtttgtattttcgtaccacattaactttttatttagaaacctttattacatggctacttatttaaaagaaggcttcgtgataagcactaacaatgtaagggcttatgatgaatgggtgaagcattcctgttgaaaggtctggacagtactgaaggtgaagagcctttagtcatgtgtgaattagatgtgaatagctggtgatgctaaaacagtgcccacattgaaagaacctgcaccacagtccccatgttgttggcagtgcgtgaacctcagcagagcattgcagtgctgtgagatttagggtttgcatttgtgactgtgtaaatgttgtaattttaagaagtctagagtttcttctttgtctgtttcttgtttgttttgtttgcttgcttccctacttcagtgctttctgcagaacaggaagtactctgtgactcaattacatctccaacccaaaaatgctgtcctttgctgtgtctgtatatacttagtttgtcagagcagctctagtaaaactttccttttagaagatttccctacactgcttaattttgagaaatacttcatttgtctgtttgcccattcatttatttgcagtgttatgtactgaacccaagaacacgtatgctaggcagcacactaccacccacctacacccccagtacataattctgagatatgctaataagggtggatgacagttaaggcattgaacaatagagaacatgataggtagggaaaataagtttgaactgaggtgtgtaagtaagaggaaaaactcccaagatgggttaatgaaacaaacgttgtgattgtggtccgtgttgtaggatgatgaagctcacatgcacggttagcggccacgtggataatgctactgctcagaaagaagtgaggatttgagcacgatgaagcccagtttaccggctaaggaggtggcagttcagagtagaggaaggcagcggcttacttatttgctgtttgtttattttttgccttgaacttaagtacaaacgctcaagtttactaactcctgctctgtaggatatggatcaagaatagagatatgatttaggactcttaagcattttgaaaatcattaaaatcataaaattatgggattggtcaggaagagtttttggagtcagaatgaggccaagtgggtggttctgggaagggatcagagaagtacaatgactagaagagactctgatctcaagcgtgaagagtgttaaatgcagcaaggcacggaagacttcctctgtctccccagctctcagtgccctcagaaacatgcccgcatcatccgttcaggtctcagaactggcaacttttccctgactcttactgaacacaggagaaaaattggccatgtttacagttggtttatacaaagtcagtgatcataggaaatacattacacttttattaaaattataacagatctttttacttttatatgtgtgggtgtttgcctgcatgtctgtctgtgcatgtatttccatggaggccggaagaggctgttatatcccctgaagctggaattacgggttttgttgaacccaggtcctctgaaagagtaaccagtgctcttaactgctgagctgagctgtttctccagtcttaacttttgttgttttgttttgggctagtgtttcacttacagcctaaactggctcagcaagggcatccatcctgcttcattcttccagcatagtgagaatagggttagccaccatgcccagcaggagatagatactctgagaatagggttagccaccatgcccagcaggagatactctccccacacctctaagcctttgtacatagatacttgtttctaaagatcccattttctactggtacctctagattgtaacgaagcttttcaaactttctttttgttttttagagacagggtttctctgtgtagccctggctgacctggaactcactttgtagaccaggctggcctggaactcagaaatccacctgcctctgcttcccgagtgctgggattaaaggtgtgcatcaccacgcccagctttcaaactttatttttaatgatggttcttagatgctttaacctcccttctagcctaccacccaccagaggaaatgggaaagaaaggaatggggaagtggacctgtttgaaaggttctttggagcaactcccatctgtgttatctggaatcggcagttcagttcacagggtagcaggcagcagcaactcagttcacttgtaaacacctcacagatataccagcagtccagtttggtagagtcgggttagcaacagtggtgacactacctagcagacagccaagccttagcctcggcttaagtcagcagtagggaccaggagggagaagttcttggctgtgcctttctcagggaagtgaacatcagcaaaaatgtgagaccacagcattgctcagctagctgtaccagcaagccaagccctgtctctgtcactccatggagtcctatttataccctctacacatcacgtgtcctccacgggtcttgcttcagcatggttcttgactctgtatgtgtatacaatcaatcccagtacgaggaagaactccagcacaccagaagttctttggtgtgtttctctctacggcttcctgacaaatgtagcccaaccacacactgcaaggaggaccagtccacgcgcgttgttagtaaagaacccttcgtcaacgtgtgctttcatgtgcttgctttagcagaacagcctctctcctatgtctgcctcagcaccgtgtccttcctgagtctgcctgagcctttcacctgtgtccactttaaggaaatgttccttcacttgtttgccccagcaaaacaccatccaaccgactttccaaaaaaccctcaagtttctactccactagactatgtaggctatactagcattactatggcatgatgtaatactacagttggggttcggggactttgatacatgtattttaaaaataaacatgtttagtaaaattttctagaaacacatgttgtaaacaatggagaatcatgaagtaggtctaatgtcttaggcagcaaatagtctggtgattctttaaatatagagataaatgtgactcccccttcttttcttttcatgtgcatgtgcgtgcatgtgcgtgtgtgtgtgtgtgtgtgcatgtgtgtgtgtgtgtgttcttatgcagtcatgacttgatattagactgtagtacccacattcggtggctcacatgtacttatagctccagttccaggtggccgagtactctctctgacctctatggctccccacaaacacctacatataaataaaaaaaataaatctttaaaatatagaaaggatgttggaggctctcttaccatagtctgaggcgccgtaggtttccttagtgatatcattgagaagatcagaaagtgtattatcctcttcaacaatctgaaagattcaatgtatggataagcagcttttcaataatatcataggaatactttgatttagaaatttaccttttctattgtattggcatctactccttgtagttgcaaccagtctataagctctgtcggtccccagtccatcagggggtggtgggttctctgttctctgtaatgattccaattttgttttattgtatagtaatgtatagccataaaatgcttcaaaagtaaccgagtggatgtaatgatgtatcccaacagaaatgtaaacgtgatgtgaaaaggaaatgaattaaacttgtttgattaaaaatatatatatagagagagagaaaggaaaaaacagaattgacccgttagttcatgacagtaatttcacttgattttgaggctttacagtgtgcagtggggccgggggggggggggtagatgtgtacaaagaggagaagaattgagttcttctccttgggtttttgcttgttctgttttctgaatacacagtctgtacagtgttcaggcattccaccgaggtaggccttagagcacaggaaggcggcaggcaaagtgcagtttgcatgtgagtaaccctgatgacggggttctcttaggtgttgtgtgttatgcgttgtgtgttgtgtgtgccactactgggcctctgttgtttgcaaaacaaacatagtagtggcactttgcatttttaattttgtgtttatttctcacacagaatttctgtttatagtaagttttattttctaattatttttgttcctacaggctgctgaatcgggaataataaaagttaaaacaatagctgcaagaaacacggaaattttggcaggtaattttttttgcattgaattcaattagtagtgaagattttactaatagttaaatagactcttaaaaccaccagttttttgagcatctacttcctgcacccgagtatggtattcatacacatgacatagaacatgtgagtgccccttaattgtgaactgattttatttcccagaggtgaaagctgtaaaattccttgaaatgagagaccttaaagctaccagttcctttgaatcaaggattttcttattcacctttgctttctcctcctccaccagagctcagcgacaccctttacccgtggagagtgttcactgtgttgactgacatgctgttcttagcacatcattagtgtcatatggacagttcatgaagagatgttgggtgtgtatgtacgtaccctgacatacactgacatacagttgacccagggccacgatcacaagatgggaagacaagaaaacaaaggggtttgtttgctttgtgtttgcaaacctttgttggactggggtttcgggagggagggattgccaggggcttctctctgaccggctctcctctgtctgctcttttgtcttctttggccccttctgtccttgcacagcgatgggcatgggggagctgggagtctggagaaccatatagtgtcttcttggctcaacagattaaggtacccgagtaagcagcaggatcagaccgaatcggggtgtttgcagtatgccgcctcggtgtttcagggctccaggctaggccccctccaagtgctttctgctcagccacagcttacgtcctcagacccgctgtattccagctccaccagcctcgcagcccagcagtgctggagaaaggcaggcttgcccacacagcttaagtatcacagtctgcacataaaacatgatttaaacaattgggagtttctaatttagagatgtcatcgcattacaacatgacataaagacttaaacaagagtggatctcccttaggcttctccacttcactggaaattggccaacaggttagttttcctaagtcatatctttctcgcatagcttcttccttgttacttaactgtttatcaaatacaccatgctctgtgtgtgtgtggagggtaaaagcaaaggtgtgtgtttgggatggaaccagtggacaaggaggttctgggaggtgcagttgggtggtctggctgcttatcctctgtgagggagcgcatgtttaaaggtattttatggcctggatttttgaacatggagacttactacagttgaatcagagtaattgttgtaaaatatttacctttgctgataatataacaaattattaattattattaacaattatcaattattcagtaataattttcattgttcttatagttaatagaagatcttcaaagaatcactatgtattctagtattgtgtacagagtgaaatatctaagcttacagaagaataagagattttagagttattgagatggctgagggagtgaaggggcttgccccaagcctgcttcccttcgatttttgacacccacatgatgagaggaaagaacagactcttgcaggttattttctgacttccacatgtgtgctgtggcacaggcacacccctctgcacacaaaattataaattaattaattaataaatacataaatattttaaagaataaaacattttaatatatagctgcattattgatttcattgtaatataggtagccatatttcacatcacaaatctttatactttaagctacatattttctaggaccattaatttaaggagatagatcagcatttaagcttgtcctagcatgtttatttatttactatttttattttatttatttaatgtatgagtgctctgttgcatatacatccgcatgccagaagagggcatcagatccccttacagatggatgtgagccaccatgtggttactgggaattgaactcaggacctctagaagagcagtcaatgctcttaacagctgagccatctctccagccttgtcctagcatttttttaatgatgtatttatagcagttgatacctacatatagagacttaactgatatcttgtcatttttaaaatcaaaggctcttacatagctttaaactggtcaggatatagtttctaaattacctagttagttcagaatacaattaagactgagaaagattttactattttaattccctgagaagtttttttttttttttaaataagccttgagattatgggatactaatttggtcctataacaaatatcaaagttcccaaataattgaggacactccagtgagccaggataccgcattcttacatgtctctgtatgttcagaaaccatgcagagttgtggtgaaagttaggacctttgattcagaccctcaagccgactttagtggtgctcagccccgtttctagtcagctgtggtctcttagctcccaggggagcccctttctcagcatcctcttttaatggctgcttctctttgttctctctgctgtcatgaacgctgacatgattggaaaggctatgccaggtgatgccagcctgagcagacgcacacgcctgcacctccgccttccatgccacacggagagtgagagatgacaatgtaaaggcttccattacaaaacctaacgccttcgtctgacttctgactgctctgtgttacaactgatttattagcctagatcacaagctactaaagttcgagaaggcatgtgtaacataaaagttatattctgcttatcaagaaatcttatcaagttgtaatatctttgaaagttcaatatctaactcttagtccaaaccctagtgattacatttaccatggctgctttcaactattgtcagtacacacgcaaaacataatcactgtctgtgactgggttagctcctcatagttctccttatcttttcctgtctacacagccttaatgctaagagtctctatagcaatgagaaaatacacttcagaatttttttaatgacataaaaagcagtttacctgtttgttttggtatagtatatcaatatatgtatttgtgatatcttaaaaaaagtattttataattttatatgtatgagtatttttcctgtatctcagtatacgaaccatgtgtgtgcctgatgcacaggaagccctaggagtaggcattggatccccaggaactagagttccaggcagttctgagcctctgtttgggtactgggagctgaaatagcgtattaactgctgagccatctcttcagttgtgtaggtgttaaacacctaaaggatacatgcaacatcgtccttggaagtaaagagctcctcagaatcacaggagaaagacagctggcagctgtgctccatctgtgctctctgcttcctgcatccctccatcccattcactcgcctgctccctccttgccagaaagttcccttctaaaatgacaagctttctagaactagaaccagcattttgttgtttcttttgttgccagagtttatattacatggcaacactgagcccttcctcaatgtaggctgtgaattatatcacagagccagcctaatgctatttgggtatacacttggagtgttgtctgatcataaagtctgaaaaaggactacaggcactctggccccgttgtctcctcagaatcatgattgtgttcagatgtctcatgaagaccatcttgtcaaaataggttcatgtgtcacttgtcacttgtcaaactgatatgtcatgattacgtgtaactggaagaaacacagagctgatggcagccaggggtggaggagattcagggcccggtcctgatgtctagcactgctcataggagcaggaagagaacgaagcatgctctctctctaccacatctgagttttatggcagaatatttagggtcgtgttttaagaataaaatcctcccatgtgcgaatagggatattttgacttctttcttcctgttttatcccttttctttctttctcatggtttgtttgttctagctaagattttgagaactgtattgattgacaaggaatggaaaggaaaaacagggcatcctggcctggttccttgtatagagggacagctcccagcctcccctccatagcgccttatgtaagcttgccgtgacggcctcacctgtgttgaaccatgctcctgccccccacttaggccatgaagggagggatgctcaccgtggcacagcacagactttctgtatccactgggatgtcacctgtttctgtgctctgttcagcttgttggttatgcatgctgaatacctttgtgtcttgcatgacctgtactggattatggtatatgttcttaacactttctcaaatattcaaatattattcttgactattttctagtttattggaagatgtactttcaaagtattctcaaataatattctggatttcattggtatttatattcctttttttctggctttattagtgtgtttttttttttcctgtttttctttgctttgttggttctctattaaattctcctctgaactttattatttcttcctatatgcttttttgggtttcggttgcttatctaggacactgaagttcattgttcagttatctgaaatctttatgatgttaacatgtaagcgttcataactataaacttccagttgaaactgctagctttgttgttgtagtcctggttgttttttttttttttcttttctttttgttttttgcatctcgaataacttgtactatcatttatttgatcataggaaaattttgtccctgattattttaattacccactggccatttaagaatgtgctgtttgatctctaaacatctgtgtctttcctgtgatttctcttattattttctaattttattccattatgattccataacatgcagaattatatcagttccaaaataatatttgaattgcttacttcaatagttttacaatattgttgtgaaattattttctccatgtttgagttaaaacttccatgccctagaaagtcggggaatagggcactgtttctctcttccagtgtgattcccttctctaagctgtgctaaattagtaacttcagaatattgtcggaagttgtggtcttagtttatcatcccatagtgtgtactttgggaggcataaagtagatttaaatattcagtaccaaattttaaaaaacactcactttgcacttttctgccacactggtgtaaagtgtgttgtggttacctctccacctccctttgcttccctttcaaacagtcaagccttgcatttcttgcacatgcgtgtgtgtgtgagtgtatgtttgtgtatgtttaagattatctgtgtgaacatggacttggaacttggtgcccaatggacaataattgctggctcttgcccagagtgcatcagtcatcagtacttcaacagggaagggtagggacatgtgcacaccctccctaatctgtgcttgacttttgacaggtacagttttctgtgggctcttgcaccgaagccacagatgctgtgtggtctcatttgcactggctgtgccacgcccagaaatggcatttcacatttcagatcttctccctatattacttacattgtttcttcccgtcttctgcatagggagtctgggagtgagtagcatttgtctgtggttataaacacaaatatttagaagttagcttagcatcctgacaataagatcatcagcaggggctgaatttaccgggagagcccaagatgtataatacaattatggtgcataatacacagtggaattttgtccatctgtaaagaaaaatgaaatgatgagatttgtagtaagataatacagagggttacagatggtcagagtgacgtgcccttccctaaatggcacttgtgtttcacacccctccctgtgactcctacagtccacaaggccaggctgccaggcatgagacacccacctctctgggcaagagtggtgtgagtgttatgggtaaaatcagctcttctctggttggaattggggcctgatccataagaggaaattcatatctggcactgtaaacacgataagaaggaaacaatggctgaggtggtctttttaccttcagtcatgattatgaatgattttcttttaagttcttctgaaaaattattttctgactcagatattcctgtagttaatgaatgagttttatttccttgaaaaaggctatcaaactcctaactttaatgttccctttacttaaaattccatgctatttatttcgtttctctgaaagcgacaaacttttttttaatctattttgcctttaagcaatttttaaattttatgttataaatgaattgttcaattgaatttaattattatcactactttaaaatgtcgagagtcggtagaattaaggttaggagtaaaagtttgtatatttagtacttaatttaaaatgccctttctgtaataacaggaagaatgctattgttgtctaagaattgtgtttacttcctgaagaaattagtgttataaacattcacagcatataaaaataatgtagggcacctatgaactatggaaggcatgatgtacatacaatttgaaccactttctgctctgtaatatgaattcttgtttattttactcttgtataatatgaagaaatgttaatttctgaacttgtacccagaatcccatgttagagaaagcctgggactcctgcagttgagtaaagactgtacatctgaatcccctgaattcttatgacttgtttctgtttggatatttactttacataaaaagaattgtcataggttctaagtacgtagacaaacgttcctcaccatgcatcgatcagtaaatcatctgctgtgttttctgaataaagcattgaaagagaacagctcagaggtcgtgcagcctttcctaatggggtgtgggaccaaggaaccaaagatcacacagttgtgtttggccgccatccagagactcatgtcccatgaagtggtgtctgaggtaggttgaagattttatctgaattgcttgttaagagttacgtcagtagtgttcatgagaagattgaagtgagcctgattcctcctgattcctcctgggaggtagttttacgaaagaagagtaacttaaaaatgaagctaacattaaagatgaactgcactccagtgagctacttgtaatctaaggcagagttcatagtacaggcactgattttagaatcaagttttcagtgtcatagaatagttacagaatataattcatattttaaagtgtagattatttgaattgatagttactcattaatgtaagtattttgtttgtatctcacttgatggtggaaaataaatagtattattgtgaatctccatcatctctcagatctgagttgattttgtgtgccgtcctctgattcacagactgctgctggaaacataattaacatgctttggcagctaatggaaaacagccttgaagaacttaagctgcttcaaacagttcttgttcttttaacaaccaacacggtagttcatgacgaggcactttccaaggtaagaaacccatttaattgatgtttataaatgttttgaggtagtgtttgaataagctgattaaaagatagacgcctagagccattggagtgaagcacaagtcacttctccacagttactgtggtggtcatccttgtgagttagtccctccagatgagaggacatccgttagccagcctgtggctgggctgagtttagtgaggaatgctgagtgggagaagagcagccgtagagctgtgtcgagaagggatgtgaaaggaagggcgggcggtgccttcattgtgtcggcttcggaatttctccatgtttgctcctcagttctcctgttttgaagctacctgtatgcattgttaggaaaccaaacagctcgggcctgtctcataagtggccaaaacccttctttgagcacttaataccacatgaggtttcctagctaatttttactttcttcccttctcccatcctctttggaatataaaatcatgaaatatttctgtagaacagaaagcaacataatacagtcctcagctcatagtttatcctctaggagtgttttgaacttgtttgtttgttgagataaagtctcactatgtggccttggatggcctggaacttgctatgtagaccaggttagcctcaaactcacagagatgtgcttgcccctgcctcctgagtgctaggattaaatgccaccagggccaactttgtttcataatgtctgtgctttaaaggaaggctagttgataaagagagatgtctgcagactcagtctgcacactgtcgtaggtggctctgggtgttcatccttcctagatgttaccttggtgttctagagcataacagctttcattcttccaggccctgtctactaagtggagtgcttgtgtgcagttccatctggtttcttgctatccagttattcttgtaataactatatttaaaatgtatacactgataccacttgacatactaaagaagaagaactggggcttgggagatggttctgtcagcaaagcgtttgccgtaccagcatggggacctgaggcgcatcgctagtaccctcgtgaggagggtgggaccaagtgtgtactggcttatgctcagtgtgggaagagacaggtgacccctcggtgtcctgattaggttccttttggtcaactccatgtctacaagtaacttggggaagaagagttgcttgagctcaggttagagaacatcattgtactggctagttttgtgtcaacttgacacagctggagttatcccagagaaaggagcttcagttgaggaaatgcctccatgagatccaactgtaaggcattttctcagttagtgatcaagggggaaaggccccttgtgggtgggaccatctctgggctggtagtcttgggttctataagagagcaggctgagcaagccaggggaagcaagccagtaagtaacatccctccatggcctcagcatcagctcctgctttctgacctgcttgagttccagtcctgacttcctttggtgataaacagcagtatggaagtgtaagccgaataaaccctttcctccccaacttgtttcttggtcatgatgcttgtgcaggaatagaaaccctgactaagacaatcatcaaggacacttgaggcaggaaccgaaacagaccatggaggagtgctgtccactgacttgctcagcttgctttcttatacagcccacccacagtggagtagacccttcagatcagccattcatcaagaagctgccccacagacatgcccacaggccattctaaggaggcatttcctcaatggaggtttcctcttcctaggctactctagcttgtgttaagttaaaaaaccctgactagcacactgaggaccactgtaaaccgtctagactaggaagcaagttccagtgagagacccagtctcaaaagcaaggtggatggtaccggccttcacacacctgtgcacactgtgggcacctgaactcagacactcacatgtgcactcttacacacacacacacatacagaaagaagtaattatagaatttattttagtatgctacctagttgaaaatgaagtattggctaataaaattgaggtagaaaggtataatgcaagcttgatcaacatagaggctcctgtgtaacaacataatatacttttttgaagttgagatatagtgtaagttttctgttaaagggcgtgtcacttaaaaactgaatgtaagagccctgaagagatggcccagtggttaaaagcactagcgggaggtcatgcatttaatcccagcactcgggaggcagaggcaggtagatctcgagttcaaggtctgcctggtctacagagtgagttctaggacagccagggctacacagagaaaccctgtctcgacaaaacagacagaaagcatactagttgcttctgcagaggacctgggtttggtatccagcacccttctggcctcctcaggcaccaggcatgtaggtagtgttctttcatgaaggcaaagcacttaatataaaatgaaaaataattcttttaaaaatgttgatcagttgataaggcacagaattttgtatttcttccgagagtgacaactattaaacttttagaagatctttatgatactggtgtatgtaaccatatcttagagcttgaattttgtggtccatgagccataaaatgagtcacagggtagaagaaaacaattgcagatacagagctcagattttatggtccatgaaccataaaataagtcacagggtagaggaaaacagttgcagctctctgacaaaggacacacttgtgcttgtaaagagctgtttaaagtattattccccaggacaaaactaccacatgaagaattgacaaaggactctaaagacacttatggattgtggcactcagtggcagcagatgtgtagggagaagctagtgaaaggagagctaaaatcccagtgttgtgtgtccctgcacgttagagcagcagatcttgacagatgtcaccatcacatagtgctgcggacggaattgctctgaaatccacacacatccagagctacagcactgcagatgtcctttagaaagatggagtttctttaaaagtcaacctgcattaccctgtgacctagccatgccactcctaggtatttatctaatgcaaaggaaaatacttgtcttcatagacttgtatttgaatgttcatagtagccttactcagaggagcaccaaactcgaaactgtccagacgtccatctccagaaatggtcacaagctcaccatgtaatccctcagcaggagaaaggggtcttgtgctggtggatacacaggacagcacacacaagttctacatggaagaagccagacacatggtggatacacaggacagcacacacaagttctacatggaagaagccagacacatgatggatacacaggacagcacacacaagttctacatggaagaagccagacacatgatggatacacaggacagcacacacaagttctaaatggaagaagccagacacatgatggatacacagaacagcatacacaagttctacatggaagaagccagacacatgatggatacacaggacagcacacacaagttctacatggaagaagccagacacatgatggatacacagaacagcacacacaagttctacatggaagaagccagacacatgatggatacacagaacagcatacacaagttctacatggaagaagccagacacatgatggatacacagaacagcatacacaagttctacatggaagaagccagacacatgatggatacacagaacagcacacacaagttctacatggaagaagccagacacatgatggatacacagaacagcacacacaagttctacatggaagaagccagacacatgatggatacacagaacagcacacacaagttctacatggaagaagccagacacatgatggatacacagaacagcacacacaagttctacatggaagaagccagacacatgatggatacacagaacagcatacacaagttctaaatggaagaagccagacacatgatggatacacaggacagcacacacaagttctaaatggaagaagccagacacatgatggatcaatctttcatataaaattgtagaaaatgctgagttgtgaaaaaaaaaaaagtgacagtttccatggtccaggagaggaagtgggtgcagaggtatgcgagaaagtgcactagagtaacagaagtgtgccatcactgcagcgtgctccatggccgcgtccgtatggagcaggcggaactcatgggattatatgccttaaagaagtacaactcagcatatacaagtttcttaataatacagttgctttttaaagggaaaagtgtggcactcttctaataaaagtacacttttatttatagttttagcaatttatatagaacttctctaagtatttagtgatataacaaacatgaacacttgctatttctaaagcaagtcactctggaaaaatgaaacacgacacactcacatacagtaaatgacgtacgcatatttgcaaaaaggattctgagctgttttagctagtcttacttatatagctatgtaacttactgagattgaactattttgaaatctgaggatttttgtagttttataataaggtggaacttttcatgtttgagtaaaacaaattatttgactttagtgtcatctcatagattctgctcttcagttttacttcatgctaaggaattttttttctaggctatagttctctgttttcgactccacttcacaaaggacaatattacaaataacacagctgctgctacagtccgacaggtcgtgactgtcgtcttcgagaggatggtggctgaagatgaccgtcacagaggtaaaggctgacagctgtctcctttcgttgtgagtggttcccatgtgcaaggtctaactctcactcacttttacatttaccccggaaactagtgacacccaaagctggaacagtttaactgtcacacatgctggaaacccagcctcagcaggatcaggatcattagtttaagaccagcaagagaacagtcttaaagaatgttcaaaaaatacctgaaaactcatacacacgcatgtaaatgcacacattcatgtgtacagatatgtctgtgagtgtggtagatacaggtgtgtttatatatgggttaatttccttttcttttttgttaatttggtgaatttatccttccaggggatccagcgaggaaggtgtatggcaggggtggaaagtggccgcaaaccacaccgtggtcaggaaggagaggggagggaggagggagggagggagggagggctgtgttcaggaccctgcttacagcacaggtgcattatggcagctttcccaggtcactttaacctagcagctccctcacaggcatgcccaggagctcctgtccttgaaggtgattccaaaacttgtcacgttaacaatcagtagtaaccatggcagttatagtgcgagagtgtgtgtgtgtgtgtgtgtgtagtgtgagtgtgtgtgtgagtaagtgtgtgtgagtgtgagtaagtgtgtgtgagtgagtgtgtgtgagtgtgtgaatgagtgtgtgtgtgtatacacgtatgtaacacatacatacacatatacatgttacttaattcttagtttgagttttattgctcaaacaccttagccacagtaactcctataaaggacaacattgaactgggctggcttatagttcaggtttactccattatcttatggcagtaagcatggcagcgtgtaagcagacgtggtcctggaggaaccaagaggatatgcaggcagcaggagactgacacactggcataggctgagcatggaggcctcagagtctgcccccagagtgacacacttcctccaaaaaggccacacctcctaatactgccacatgctatggccaagtattcaaacacattagcgaataggggccattcttattcaaaccaccacactattgatgacaatttaaaaataaattattcagctggccatagtggcacctgcctttaatcccaggccttgggaggtagaggcaggtgggttttacaggttccaggaaagtcagagctacatacagagagatcctgtttcaaaaacccaagcaaacagacaaacaaatgattcactatcttatcactctgggtagatgtttcattttccatcttaagttttaacatgtgtatagaccacccccattgaggatgataatttcacaatttaataaaatattatattgcatatattttatgcaaacatatcctatgagtatttgtggggttcttttatctgttggcctatactgtgtggctgtgctctaatgcagtgagcagctcctgctaggccctgtggaccgctgggttgtagagctgccttgagtatctccacctgtgctttcagtggtcaccacggagagttcagttcccacgcatagctcctcgcgtgaatctctgcctacgtgcatcctacacctatcagaagttactggtgtatgttaacctttcacatcttattaaatactctgattatagtgaggtatttctttgtggtttaaaattattcttaagtcagaaacattcttttagagaattgacaggagtgaccttttttggattacaaatgatttttccacctgctgtggcaaagatcttaaggtgctgcagtcatgaacaacctggctttttttgtcaagcaagaaaaattgtgtgtatatgtatgtaatgtgtgtgtgtttatatataattttattatttattgtgtgttcaggtgtgtgcaggcaggcatagcacagcacaaacgtggaggttcatgtgcgtgccctccctgagttctatcccagggatggagtgcaggccagcttgcttggccacaggcacctttacctgtggagcatctacagccttgggcctgcttagctgcttttccctttacatagtggatctttgaagttggtgtgtatatgggatattgggaaatatggccgttgtgcatcctctaagaatgaccttgtctttcctgagctgaccgatgattaaagtttttgcgtttagattagctgttcttcactgttggtttgctagactgttcccactggtgttggaacatggtttccctgcagttccctctgaggacaagcacaaagacaatctcagtagccgtaagtgtcagggaaatactcagagtcgcattaagcacaggacagtttcctagtgcaaatgtcttatattcataaccttgatgtaattcctggagtagtattttcatccaaatttctctaaaggctagtataccatttgctgcttcctagtttaataatacagaaaaaattaccaagaacagttttcaattatttattaaatcaacactgattttaaaacaagctgctataatttacaaagaatatgtcctttaaaaaattattacactcgtatgtatgtgtgtgtgtgagcatgtgcacgtgtgcacacattcacatgcaggcacacaggcacacaggtggaggtcagaggacaactggcgagaattagtccttatcgtccaccatgtccatcctgggcctcaaactcagaccctcaggcttggtatcaggcacctttgctcaccagccttgtcaccagcccagagaatgggatcctccctactaatgtgaaaaagacaggggctgagcagggaaaaccgctctagctgattcttagctgatgcccccatgactggcagcaaccatggccgaccaaacagttaatccttctgaacgtggtaaagggcagaagaaatgactatatgtaaactttatgtttgatatttaatacagagtcagagatcatgtgataaaagctgaaaaataagaaactgggaaaatcaagtgtttaataaaaataataagcttgttaaagtgtatgtaagaaaatgagcaattgttattgtattttgtataaaaatatcttgtttgaagacatggttctttaaacaggaaccaaggttatgtaaaatattatgatgaattttaaacatagtatgtggtttgtaaaagggcatttgaacttcagtttctggcctgttttgcagatatagaacctccagtgccgatccaaggaaacagtaacagaaggtctgtcagcacgctgagaccctgtgctaaggacgcatacatgctcttccaggtacttcagctgacagaggaaccctactgtaacatacagcctgtgcaagtgttttattgcagaatttatgtctaatgtgattttaatccaaaaaattgcataaaattaaaagtattattttatattaaagtaattctaaaaggctgaaaaaaagatttccgcatctactgtatacctaactagcatgataaaatgttgggccacaccttacggaagcgaaactagactcagaactagagaaatgggtatattagggataacgagcattccttcagtgggaagaggttaagggacagattggctgtttactcagtgcaatctgatacacaaatgcctgcttctcacatcagttggcagactaaatcctttgaagtatagtaagactaaacgcttactccttattaaaatagcactaatacttgtctatagctgtctgttgtctgtagttacgtacgtcttttggggcttactaatctactgcgtgtacaatttgtcaaaagtggaatcgctaatgcttcatttttaagaaaaagaggtttgtttcgtttgttttataaactgggtcgtggaaagcgtacgttatcatattacatgacacttttttgtttaatttcgcaggacctctgtcagttggttaacgctgacgccccttactggctagtgggcatgacggaaatgactcggacatttggccttgagttgctagagtctgtcctcaatgattttccacaagtgtttttacaggtaagccaatagatattagtttgtcacaaaatagtttttcatagctatttgtcaagggatcagcatgtgtgtcctccatattagaagatgcggtgtgccttaggctttagagcggagcggcctggtctgaccgcttgtttgagagtgtgcggtttgcttttcgtggtggtttctgctcttctgtgatgacgctttacacgtgcagctgccctactctcctgaggaaggccataggaataaagaaagccgtcggtctaagtttgctttagtgttggtttttgtaattaccccccaacattttaaaactttattattagaataaatcttagaaacttatttaggcaaatttccccaagctacagagttaggaaagacatgtgaaaacacactgtttctttttcttttcttttttcagcatctgtggttgttttgtctgcatgtatgtctatgtaccacatgcattcagtgtccatggatgccagacgaggatgcctgatttctggagctgaagttacacatggtttttagccatcatgtgggtgctaggaaccaaacctgggtcctgtggaggagcagccaatgctcttaaccactgagccctctcgccagcaccaaaataagtcatttctgagcagaatccatgaaaaccattattactgcataattacgttctcaagttctcaaagtgatctgctagcacacattactcctatacccagcaacactgtctgttatacttaagggaaaggaaaaacctcctgtggttaaaaactaaagaaactcatgaccactaagccaccactaaggaagatacttgaagaaattcttcaagagtaatcatgctgaagtatggaatgaggaataggaaaatctaaatccttcaaaatcaataggaattaatgtgcaagtttcatttataactgtatagtaatggtctcaattctctaatcaaaaatagcacaagttgtgagactgagtttataccaaattttggaaaacagacaccgtgtctccctcattttttgtccataggatttcatagtcaggtaaaatcaggtgtgaatactgaatgaaagtggaagctgtgcagggagaaagaggagggtggagagcgtgggagcccagtggacttgagtgtgctctgcacacttaggaaggtgctttcctcacacagacagtgagagcgacaggtttcacaaatgtcctcaagcatagttttcatttggcaataaaagaaactgacacaaatattagaatcaaaatttcagtcactctcactatccctttttacacggaaagaattaacgcatacattaaaatatatgtgacgaaaccgtaagagcacacctgactgttagctcagatccaggagacgaggctagtgacggcagtttgctggttttgtttggttggttgtttttaatatttactgagcaaattaattaccgataacttgcttattttcctgtaacattaaattattaagttgggtgatttttttaaatgattctttcatggtcttaatgaaatctgaatggttaaaataataaaatatattggaagttaattattaagtacagacttaagccatatattgtcactaaagtgagactactcttttttgtttgtttgtttgtttgttgttttctctttacatcccagttgatgtcccccttcctggtcaccccctctcatagtccctcccccatctcatttcctcttttcctttaagagagtggaggccccctccaggtacccccacgctggcacatcaggttgatgcaaggctaggtgtatcctctcccactgaggccagacagggcagcccagcaaaagaacacatcccacactggcaacagctgttgggacaacccccactgcagttgttcgggacccacatgaaggtcaagctgcacatctgctacatatgtgcggggggggcctaggtccagcccatgtatgttctttggttggtggttcacactctgagagcccccaagggtccaggttagttgactctgttggtctttctgaggaattcttatctctttccccctactcttctataagagtcccaggcgccatctaatgtttggctgtggaattctgcatctgtttcagtcagctgctgggtagagccatgctaaactcctgtctgcaagcataacagagggttaatagtgccagggattggggcttgcccatgggatgggtctttagttattgcttggctattccctcagtctctgctccatctccatctcccccagctttacatttcttatagacaggacaaattttgcttcagaagttttgtgggtgggttggtgtccccatcgctccactggggttccttcctgcctggctccaggaggtaacctttttaggttcataccccattcttggagcctccccatccataggtctctgtatcccgaccccactccctcccccagctatagatttccattcattctcattaggatcaggtatggggagagacaggggagatggccagatggccagcagagtgagtgagactgctcttaactgacattaatggaaaactagcaagttaacgaagcctttcacctgacttatagtcactttaaataacattgtactattatttatggaattctcaacaagtaaaatgttatgcttgcttcttatggatgttatctccttgtggtctgttggagcaatcaaatagatattttcaagttagtctttaaatcatctttacatgagtaaaattatttttgtaaaataacttcagagaaatatatactttttgataaataataattattaattaaatgtttactcttattttaaatgctttataatcttgtgttaataacttaaatgctttataatcttattaataaacactaaaaattataaaatcatgtatgctctctttttaaaatatacattaattttttaaaacttcttgaaatatttttagtttgtgtttaatccatgtaagaacagcacatatttcaaacctctttgtaaaatatacaaagggcctcatgagacaatactactttcagattctaggagagggacaagcatcttacccaacagtgaaataacttacccaatgttatctggtttgaaaatactaattagatatgattgatagtgatgagtagtcttcactttagtgaaaatagaagcttaatctgcatttaatggtgaacttcaaatacatttattattttaatcattcagatttcaggtgatcagctagatcgattaaatagaaccagctcacacaaacaatgctagttaaaaatctttggaaaacaaacaagagacagtgaatgtggaaaagaaatgtgtaaggaatggggtgtgagatggatgggggaggggtgtagcaggcataggagagaagtaagaaaaagtagagagaaactggaatattttgtatttacattacaaagctgtcaaagaacaaaccttactaagaaaaagataaactcattaatttagatcctttatgataatctaattttttagaagtatcactacaaactcagtgatttttttttcctttgcaaatagcatcaagaattcagttttctcctcaaagaacgggtgtgtccgctcgtgatcaagctcttttctccaaacatcaagttcagacaaggctccagtacgtcatcctctccagcacccgttgaaaaaccatattttcctatttgcatgcgtttactgagagtggtgtctgttctgatcaagcagttttacagcctcttggtaagtgttcatttctgggcatgttttatatacattgcatgtattcttgtttctgacagaataccccagctgcggacttgaaggagggaaggcttactccttggctcatggtttcaaaggctttggtccttagacagctgattgtattacttcgggcctgagttaggtttgggggatgtcaccaaagccgcctatctcatggtagccggaagcagcagactgatcgtgcctgtggcagcaggcctcctcccttgccccttttattccacctgagttcccggcctttgttggagggctcacccgcatgcaaagtgaactgcccttcctattcatcaatcctctttgagaataccctcacacgtgtacccaaacgtggacctcatgaacgaacgctctaggtgttttcttaattcaatcaagttaacagtggaaatcaaacatcagttgtttttaaataaaatagatagatgtatatatgttatattatatgtgtatgtgtgtatataaaatatacatcttttatttatgtatgacagtgaagatgtattgatgctagtacagtttgcttttgtttccatgattcctgccaaggcatttactgttgtaatgctattgcttttatgctatcagatcaagtttcattacactgaaaataataaatcgtaatagtattattatgaaaattcgtttgacctcatacattccaataaactatcttgagcttatatgagacctcaaagcctgtctccataatgatacacttcctccaacaaggccacacctcctaatagtgccactccctgtgggcctagcattcaaacacatgagtctgtggggtacaaacctatttaaaccaccacattccactccttggcctccataggcttgtagccataacataatgcaaaaatacatccagctcaacttcaaaagtccccatagcccttaacagtctcaaacttgtttaaaaatccaaagtgcacagtctcttctgagactcatgcggtctcttaactgaatcctctataaaaagaaagatgcatattttccaccatcacatcttgtgcagtggcacaaggtacacattactgttccaaaccatcatagtgaggaaatactgggcaaaggcaagaccagaaaccagctggcaagctataaactctcaatctccatgtctgatgtcagtgctcttcagatctccaagtcctctcagcgttgttgactgcagcgcacttctttttttttttaagatttatttattttatttatatgaattcattgtagaagagggcatcagatctcattaccaatggttgtgggccaccatgtggttgctgggaatggaactcaggaccttcagaagagcagtgagtgctcttaacctgctgagccatctctgcagccctgtagcacacttctttctcttgggctgcttccacttccttttagcagctttccttggtagctaccccacgactctggcttctccaacatcacggggtctccaaggcaattgggcttcacctcgccagcttcccaaccgccctgtgggcctctgtgctgtggtacccccctccctgccctctaacacactcgtgcctggcctctgtggctttcctgagtcccagagggagatttttgtttgtttgtttgttttgttttgttttgttttttctgagacaggatttctctgtgtatccttggctgtcctggaactcactctttagaccaggctggccttgaactcagaaattcgcctttctctgcctcccaagtgctgggattaaaggcgtgcgccaccatgccctgcctgagggagattttataatccctttctaatgtccttgactcaattcccaggcagcagaaggagactgagtctctggccatagattgagtttatatgagatctcaaagcttgcctccatagtgacatacttctccaacaaggccatactgcctaataatgccactcgctatgagccagacattgaaacacatgagtctagttaagccaccataaaccaaactgcctctttgctttctagcatatgtgtggagtatcactgaaggtcagatcatacatttgttagcagtttgtagggctagagatggcaagatggtgtaccatggtttctacaaataaggatcgggaatgaacagcagaccattagtatctcaggcgtatagttagagagaagccatggttgtgttctgctgaactagttctgcattttattctagttactgtgaagatgatttaagattgttattatcatttcttttttgcttgaatgtttaaaaatctgtttttttttttaggtgactgagtgtgaaatatttctgtcacttctggtgaagtttctggattcagataagccacagtggcttcgagctgttgcagtggagtcgatacacaggctctgtgtgcagcctcagttactaaggtaagtcgcagcaggattctgctaaacagatagcccttatctgagctcagaagagcttagtgcctgtgtgtaagtattagtgctgcttcccaattaaattgtgtttatgtgcacgaagtcactgcagcgtgagctcaggaggacccgggagagctcagacacgtgggtagtgagccgtcatttactaagcaaatgaagccaacatttctttttcttttttgttttgttatgacctttgtcaaataaacctttgtttctaacccaaattagagaaaccactcaggcataaagaatgacaccaaatatggaattgtaaatactaggcaatattactggctaatattaaaatgtgaatattctaatacattaaaatgcttttctcagaaatgtttaaaattattttgcaggtcattttgtcagtcgtatgacatgaagcaacattccaccaaggttttccgagacattgtgaatgcactggggtcttttatccagtctctgtttcttgtccctcctactggaaatcctgccacagccaaccaagctggtaacgttgtcatcgtcatcatatttgtcttcactttctcccttggtttacaggagtcagtgttatgagagaagtttgtgctatacaaatttaaaccacctattgagagtaaaagtttatatttttataaaatataaattttgtaaaatatataaaatgatttgtatttttgtttattcctataactgtatgtgtttatatatgtgcaggcgcaggttttgtgtgtgtgtgtgtgtgtgtgtgtgtgtgtgtgtgtgactgggacctggggctcatttgttaggtgagctggatggctagcagggtgctgactctgcctccttctgcctccccagtgctaggattgcatgtgtgtattaccaagccagggttttgtgagtcctgaggagtgaaataagcactccttcatatgtccatcagtttgttcatgttgcaatttctctgtccagttgcatggtttcttcatttactgtgaggctgaggtaaaaataccttccaccattttctttaagacacacacacatcttagtgtactggagagcaaactcgagtcctcatgcctgagtgacaaaggctttaccaacagagctacctattcagggatccaactcagatcacaaggctttgcagcaatcaccttttatccccagagccttccacctctctagcccctcagatcatcttcaagttctggagatccttctccaaacgaaacagctcagggaggcccctcccttttttcttttccttcctattagtgatttttagagtctacaaattatggaaatggtttcctgtggttctttcattcttatattaaaaattaagtggttatttaaagaaaatagactctctgggtaaaacagagtcaacagatgtcatttgtaggtatcacacttgagagcgcagaatccttctctaagtctgagtaggcattgggatgtattggtttgtaatcagggagtaagctgttccgattgcttttcctcctttccttacaggaaacaataatgctggcggcccagcctcagcaccagctaactcgggggtggtgggcgtcggtgggggcgttactctgctgccagcctttgagtatcgaggagcctggatacccatcctgaccgttaccgttcaaggcagtgctaaagccacctagtaagtagcagcagcatggttttataacaaacaataccgtgaagatgatgcttaattctgaagtacttctgtctacattatatctaatatcgctaatacattttggagcttactttgttatattctgagaattttaagcagcactaaattttctacttgtagggttctaaatagcactataagcaaaatgccatttatttactggagttgtagttcagtgtgtggcttgaccctagacctcgtggacctagctcatctagaacagagttccctttggcaaattcaactttatttaacctaattaatcaatgagatggaagtggtcacgagctaaattctaggactttcttgtgtacaaatgtgtaattcttgtgtccacatgtgtaattcttgtgttcacatgtgtaattctgtgtccacatgtgtaattctgtgtccacatgtgtaattcttgtgtccacatgagttacagaagcattctgctggtcagtaagttgtctttttcttgctactgcccatggaacagagtggtttcaattttggtggagtcagtttacccatttttttaattgtgcttttggtgttatatctaacaaattgttgggagaagagacagaggcataaatcataggaagaaacataagcatacatgttaagggttttgtaattccttttatatgtaggtcactgatgcatttcaagttagttttgtgtgcaagagatagggctctgacatctccttttctttgtatgtgactacaacttacaactattacctttcattctttgctggtgaattcgtccatttatgttcttagcttgagtaatggccattttgggggctctagaaccgtagttcctcatttttcctaacttagcaggtaagagtttttgtctgctctctgaacacttgctccctcctgtgcagtggatttgaacttgacacacacatgcccctcagtgatgctgtactcaggtcacgtgtgccctgggtatctcagggttgtgctttctccgaggtgaaagcatcttcctctttgtgggtttattttatcttctctgtcactctaaaggtaagaggctgagaagtgccataatctatgttcgtgcattttctgttggtttttatatttctcgcaccaaagaatagtgaagatgtcacggaggccttaatttttctgatcatttttttttacattaaaaaaacacactgtgtgtgtgtgcacatgtatgtgtgctgtagcacatgtgtgaaggttagggtactgcttgcaggagtcagttccctcctccatcatgtgggtctggggatccaactcagatcacaaggctttgcagcaatcaccttttatccccagagccttccacctctctagcccctcagatcatcttcaagttctggagatccttctccaaacgaaacagctcagggaggcccctcccttttttctttccttcctattagtgatttttagagtctacaaattatgggaatgctttcctgtggttctttcctgtggcttctcattagtgcttgtatttctcgtgatttcagcctagagatgctggacaaagttgaacccccaactatcccagaaggctatgccatgtccgtggccttccactgtctgttggatcttgtccgtggaatcaccaccatgatagaaggagagttgggagaggtagaagcagagggtcccagtgtcacagagggagcctcttcacagtcgtcagaacggcgagacgagcaggcggcatccgacccgatggaccaggaaacaggtgtgctgtggctccctgcttgtcactgctgctactcttcagtcctttgaactttggggagaattgagggagtgtccctgatactgacacatcaccatgctgctcttacttcctcttgcttttgtacacacgtcgtcgctgtatttttttctgagctacttgagatgaagtctagacgtgctgtctcactgcagctgtctcactgcagctgtctcactgcagctgtctcactgcagctgtctcactgcagctgtcttactgcccctcgctcagtacctgcacctggttttctaaaagcagccatagtctccccgattctgatgcagtcatcagaagttaggatcaatctaggatttaatattaacctaggtcttattcgtatttaccatttgtcccagtgtttctccttgtggtccttgtttttgaatatactgctgtgtgaggatattttcctacaatgtggagcacagttcttcagctcttgttctatatgaccttgaccttgttagaaggatgtatcccgaggtagtttattcactctaagattaacacaggttattcctatgtttaactggctactagtttgatgtatcagtatgtgaggaagcaaaaatgccaggttttggagatgttcacttttgaatatacttggatttttattgaagtatacgcactggctgtgcttttttagtgtggtgctcttttcaggcccgatagtgttcttttgacatgtctcgtgtccctccgtccccttacaactcaacacaagatgctctcagtgagctcatgtttccagtccagtccaggtgttgatgagttttccaggaagcccaggtagatagagccgagactgacaaggacacctgtcacgtgtctggatttgaaatgtctgcttccttgtactaaaggccacgaagtcaccccaggttctctgcttgtagatcatttctgcaaggtcagttctaactttacagatttgtaaatctcatctccactgtgaggtgcccagtgcgatttgattcagtgtatttacttacgcttcattctcaacatatataatggtgttctagctgagcaaacctttagactctagtccacattaatttctacttgatcacacaggtagacagtttggctactgaaggaaatggaactggcattatgtacctttaaaaagatatttcttaactgcatagtggactatcatgttttaactctcatgttttaaaacaacttcaagacttttttttttttttattatggaactatcacagcttctgcattttcattatctgggtattgtacatattagtgtgtgatacctaataactgagttattgactcatagactgccagcttgctgtaatggtgtcacctggttaactgttatttttttagcagtgagcagagctgtttgggaagagatggtgagcgcttgctggtgtggccttctcgctgcgctctcgctcctcctcgacgccaggtactacgtctgagtctgtaagctttacattgtgtcattgcagttaaagccgacgctacagtaacttccccgtgtcccaggcatttatttcctatgcccagttttctgtgtgagtagaactttgacgttctttttcaattccatgtgcagtatgataacttgtgtgcacactgtcgtgagaagctggggtgattagcattgccgtctcctgctttctgtaagaacatcgtgtctctccccacacccacccccgagcctgagtttgctccgcactcccaccagagtagtcatgatgctttcatcagagatacagctttcaaactatggagcgctgtgtcatgtcaaggcttgccactgcctagcactgatgatcatttgcttgctatttctccccagaattagctgactttaagatgcttgatgccaggtgtggttcctgcctctaacccagcacttgggaggttggtgaagatggattggaatgagtttgaggccagcctgaataaacaccctgtctcgggaaacacagagaatgcttgatatttttagtttaatctttattccatccatgaattgtattacatgttataggtcaggctttagatatttgattacttgattaaacttccatcctaagtgcattgggtctagcttttcttgaaacctccctgagtgcatacgctgaatcttgttgtaaagcgtaactgaagtaagcggaaagctaaacagagcgcttgtcttccagcacagatgaggctgccaccgagaacattttgaaggctgaactgaccatggctgctctctgtggaagactgggccttgtgacctcgagagacgcctttataactgcaatatgcaaaggctccttgccgccacactatgctctgactgtgctgaacgccaccactgcggcgacactctccaataaatgtaagcactaagctgcacagcttcctccatctgctgggccagcagagaagggggtgggaactccacgttcaggctcctcccatcccgggcatggacggtgctccctccggcaggtgtgctcccgcctttccattttgtcctcttcaacacagtgcttttatctcctgaaagggaagagagaagatgagacttagggtcattggactctttgtttctctttcccatgtggccacatagaatatatctcttttcttctgctcatcccttaaaaaaaaatgtggagagattaaattgtaattgcaatgttaagtaatacttatatgttataaagatatgtgctataactatggccttccttgtaactatagtatgttgttggggtgatgactcctggttttctgtctggcctaatacaactgcaatatttccaccacttacattatactaatggtaaaaaactaattatcttggctaatactttgagaacgctaagatttattacatttaatttatatatatttcaatgtgatacccagatttcacactcaaaatttatttgcctataactagaaaagaaaacattgattcatgtttaaaatacttaatgtgttctagttctgttttgctcataaaacgggctactagcattttataattataacttacatggaaaattatttcacgtttgcttctgttattttttgcacctaggtgtcagatgtttacatacatctgaatggcagtactgctgttgaattggaagggttgaactgaactttattctgattcatcttttacaatataatagtaccttgacagaaatgtgagctctattctgcactgaggctttctgttgtgttctagcatattctatccagggccaaagtgttatgatgatcagcccgtccagcgagtctcaccagcaagttgtggccgtgggtcagcctcttgcagtgcagcctcaaggaacagtgatggtaatttgactagggtcggggttgttgtggttaccagttagtggtcagggcctctgttgtgctccagttttgtactttccaaatggtattactttctgagtttccttttcctgaacatagtaattatttattttcttgacatgattatagccagtatattaacttaactttctttgtgcatgcatgtgtgtatgcccattgctatgtatgtaagcacatgtgtagcagcaagtgtgcgtatatgtttgtgtgtagagaccagaggtcgtcgtctgccgtcttcctctatctgctgatgcacggtttctaactcactgaatctagagccccctgctagtctaggtggcccatctccatctccagatgctgggcttatagatgaatcaccgtgctctcccagcattaacatggattatggggatctgaacttcaaccctcacacctatgtggctttggcatccagctggtgggtaaactgaggcaggcagttgttgggggtcagtgcttagagccgctgatggcagtggatccagatacctacaggggctgatcccaatggcagcctgcaagtagagaagttattcagcagacctttctctgaaggaacagtagaacagtgggtgaaacaaaaggcaaagtccaataacttcatacactcaaatatttacatacacacatgcagacagacagacagacagacagacagatatattcacattcacacattgaatggttagaggaaagctccagcaagcagtacatatatacacccagttggtggatggagcaagctgcagcacacacccagacaagctttcgatatatgcacacatacacataggcgatgaatggagggaacagtgttccagctctccacactggtctttcttccatagcttgtacatcccagcaagatctttgaagcagtatagaatcacagtgcgttaccttttggttttcttctgataaatgattatgaaaacacagtgtgtcccctgcatctttacaagaaataacgttaagtagtacaggtaaagaaaacaaattatttccccaaacccacgtatattcatagctaagcaacttgttatagactaacaaagtgtaagtaagcaagggagttttctcagccagtttctcttactggcaggcagcaatttgcagttacaaagaaaggagtaattattttattatttatctttaaaagtagtcttgtaaaattcttgagtcacagatctaaaccttcatataaaaatcagtcatatctaccttaaatactcagaatgcatatttattcatcagcttatcttactaaatcatatcaggaagctgagggcaaacatgggtacaagaaatcaatcatcgccagtccagcctcagtgagagtcaggtcaccagtgctgccgttgtctcgtcccctgactataaaaggttaaataataagagtgtgcctttctgaacttgatatggttccctaagattttctacatcagagccagtaagtagcaaaaacatttcaacctagcttcactaacaactgtatttttccaaatgtcttctaaaggcagtagtcattgctgacaatctaagtatctaagttcttctctagggtggtgattgaaccattaactgccccagcagcagtgcctgagagaaagcaagcattagtactgtgagtgccagagtcacagcccagtgaggggctggagggccctttcaagttttcatacaattcttagattaagagggatgtgaaggcagcaagcagagcagaaccccataacagcatgaagtcctcaggacactggtcctcgggccgtgccacaccgaggctcatctctgtggctatggtaccaggtgggctgcatttcatgagttctaaagccatttgtcgttcctcctgcctgacccttggcaatgtggcaaacagtttcctcagcaaactgtcactccagccatagtaacacaactttgtgttttgtaaaaccacccaaacttcttttcctagtattcttgcttttcatttaagacagtctttgaatgcattcgtgctgatctgtgagctgttaatttttaagaatctatagaagttgctacaatctgtttcttttcgacatagctgacttccaaaaatattcagtgcatgaggactctgctgaacttggcccactgtcacggcgctgttcttggaacatcatggcaacttgttctggcaactcttcaggtatgctgcagtactggattctaggtgtatgactgctaacagttaaacaatgcctgctgcagtactggattctaggtgtatgactgctaacagttaaacaatgcctgctgcagtactggattctaggtgtatgactgctaacagttaaacaatgcctgctggccctttaggaaggcctaagagatagtatgaggcagagacatggcaagaagtaagcaagtgttagcaatgcgtcaggaagtaatggactgcttacagtgccataaactctactgctcatgctataattatttcatatgaatggtgctaattactttgctcctaattattaggatattactgtgtttagttttcattgtgagctattaccattgattttagttattagaatttttaaggttttatcttgttttaattttagcatcttgtgtggattctgggactaaagcctagtagtggtggtgccttgaagcctggcagagcagtagaagggcccagcacagtaagtggcagcccctgtagttggtgggggcttcctgaaatgtcacgcacactccacactgacgtcccccttcttctaggttctgacaacagcggtgatgacggacttgccagtgatctccaacatcctttctagactgtttgaaagctcacagtaagtccctgttgtaaactgacagctacactgttttgagctgtatatttgagatgaaattgtctttttcattttcattttaggtatcttgatgacgtatctttgcatcatttaataaatgcactttgttccttatctctagaagcaatggatatggcctatggaaataataaggtgtggtaatctacatttctttttagttatacaaggtatataagtcaccctagtgtttgatggtagggctggggctttggttgcagtggcctgtaggtaggtgtttagcgcttgtagcaggagtaaagacggcacggtgtagctgctgatttgtccatgtgtgtagtaggtttaaagttatgtcccttctttcttacatgcaacacggcttttatacggagctgtcacaaactatcttgacagtgcttgccaggaccacttacgatgcaggaaacacaagactgcagttaggacgtgggctgtagattttggtggtgggtttgccctcattggagtggaaaatcagaaactaatcatttcttctggagataatgattctcctcaccttaaaattaaacattttcattgtctactaattgagtaaatagaacaagactctgtccttcctgctaggtaaggatagactaggacttctgcatattagcattcaagagcatttctttctgtactcagaatattttctattaaatttgtaaagcacaggaaaaattgaacttaaccatattttagaaattgctatttgaaatgaaatgtttgaggctaacagcattgagtggtaaagcacttgccaacattgtaggaggccttgggtttgattcaatcacagcaaaaatatatacagaaaaaaaaaattgttaggtgagagagcaactcacagtgctcatctgattgtcctgaggtcctagctctatataaaaatggaatggaaccctttatacctgtgtgagtgtgtgtgagagtgtgtgagagtgtgtgtgtgtgtgtgtgtgtgtgtgtgtgtgtgtacacgcatgcacgtgcgcacgcgccctatgcccttgcaggccaggagatgtaagatcccctggaattataggtagtataagccaccaatgtgggctctaggaactaaacttcaatcctctgcaggagcaaccagcactcttaaccaatgagccatctctctagccccctctctacatttaaaaataagcatagtctgatcacttcccaatatgaagataagccagtggcacatgcctttaattctagcactcaggaggcagaggcaggttcaaggccagcctgctctacagagtgagttacaggacagccagggatacacagagaaaccctgtcttgtcttgaaaaaacaaacaaacaaaaaagttgttaaaatatcttctctaaaaaaatcttcagcgaggtcaacctggtctacagagtgagttccaggacagtcagggctacacagagaaaccctgtctcgaaaaaccaaaaaaaaaaaaaaaaaaaaatcttcatgtatgaatctagaacatgtatatgttctttgaaatgctacagatcattatgatgtacaccctattaaatgagaaggacagagaagtgctgatcctagggagccattcctcggggagacttactttctgacacaatctaattgtatagtaatatctccattttatacattaaaatttcactagatactgtaatttatgtaagttatgtagctactcagtggtctagtcaagatgagataccaggaagtttgtaggcatcagtcttaaacttgtaccttacttatccataaatagcaattttctaccccaaccctcagggcatctataggttagaccatgccacacttgtcttgaatcccaggtgtaacttgcattaggaaaggaaaagatactgttaaacattcccatgttgcaaatgttttcttttttaaaatttttattttcaacaccataaaaacattaagaatgcagaatttttaaaaaaaacttagatttgtaggtctctaagatctgtaacttagtcgcttctctgccagtatactttggtggtaactttaggagttgatttagagtctcagaaagatttgtctcatgataatagggtctactgtatttcctgctaactttacatgtacaaaccaatcataatttaatcattgtagtgttgtattttattattagccatcacagaattctcttcaatgtatcaaagtaatatgtttcctccttaggagccatctctctttgctgttgccaaactattagaaactggtcttgttaatatgcacaggatagagattttatggagacctctgactggccatctacttgaggtgaagtgtcttgcttaaatactatcattgtttactgataaaatcatgtccactgatcttatgatccagcataatgacatgttagccgacctccttcctcacgcagtgtattttatcagaggactatagttgtgctgtgcttagcttggggaagggtgaatcttgtaaacaatgggtaagtgttttccttgtaaaatggcagtgctgtcagctgtgtgttagcatctgcttccttccatcacagtctcctgctcccctccatttcaggtagttctgaagttttgaagcaatttgggatgagagtgagttacaaataacttgttcacaagtttgctgctgtggaggtagcaggagaggagagggctgttgcgctgatactaggtcacagacagtgagtgaggatctgatggagagacacgcccagatagtgagctggcgcttaactccagcggcttgtgtgtgctcggggaccatgatcatttcatgtcaccttcgaagcctgagaacaatgctgtccttcttcctaagattttactcattttattgggattaaatttaccaacgaaggatgttactaatatatgagattgttttatgacttagccagcttaagtgcgactgagctgagcatagtgctgtgtaaactgagcttgccttatcgagggctgagcccttgggccaatgggaaagaggaacagctgacacccttagggtcagctcactgtgctcctatgacatgctctctccttcctttcctgtgacttgttctggtttcatcttgtctttgttttttctctcttgcttcccttgcctttattcagaaggtaagcgcacagaaaatatttaggtataatttttcttttactctttactgaatacatgatgtttttctgttctcgggttaatgtgtatttctcaccttatgtatgcaattgaatgaagtttgttgggtgtgtgtctctcaggtctgccagcatccaaactctcggatgcgggagtggggagcagaagctttgacgtcactcattagagcggggctgacgttcagccatgagcctccacttccacagaaccaggtaaaagtgctgtttgcaggccactgcagctgcagttctatgttaacgtcacctcgtgacactctagcattacctttctttcatgagactgtcttaatgtagcgcaggcaggccttagtttataggcaaggatgaccgtgaattcttgggcctcctgccctcccctttcaagtgctgggattttaggatgtatgctccaagccaatgtctaaaacagaatccttaaacttaatactctgttttacatgtcgggtacggatcactcggagttttatggcggtcttcataaaagagtctagatgatgctgaattaagttactgcagctctggacctccctctcactacccagggacaaagcatgtgttgcagcagcaagcacgtgaagttggggtcacactgcgtgtcttcctctaccacggctcagtttactttctgtagatcaggctggccttgaactcacagcttttgcctcccgagcacttgcttggataaaaggcgcgcaccaccaggcagggcttgcttcactcttgagacaatctctcggtgaatctggagctccccaaaggagcgggactgctccacccacaggctcagtgagcaccggggctgaggacggttgctgtgctgctgctgtgctgctgcctgccttcttatgtaggtctggactcagtgctcaggcttactcggcaaggccccagctccaataaaagagacttcatccataaatctttttgtcactttatactggcagaatttttgccattcatacgtaatttacagtggagtgtttgtttgtttttaagttcactgacgtttcagggtttcaacactgagtaaactgaagtatctgtcggccatcaccagtccccttaccatctcattgtctgctagctgtattctacacatgacttcagcacaccattgttgactgtcacctttagaacaggacaggatggttggcaggacagagagacctctgctcttgtggagcttgcttcttagtgatttccttttcctctgctatagcttaaagggcctgttttgcttgtttcttcttcttcttcttcttcttcttcttcttcttcttcttcttcttcttcttcttcttcttcttcttcttcttcttcttcttcttcttcttcttcttcgtttgtttgtttcttcttttggttagtgctagggactgaaccccaaggccttgcatgtgctaagctgttagcaccctaacactcaggacacccactgctcttgatgtttaaagacaggatctttctgtagagtcctggctggcttcagactttcagtcctcctgcctttgcctcctgagtactgaaactgtgaacatatgtcactaaacctggtagctctagttgaaggctttaaaaaaatataaagtcatcactgacaaaatggctcagtgggcaaaggtgattgtcgtcaattctgacaacctgagttcaattcccaggacttgcatgccgcaagagagagctgactcctgcgagctgttctccgacgtgcacacgtatgatatggtacatactcataaacactaagtcagtagtgataaaaagacagtcagactccttttctacttgcttcaatttcctcaatgtctgatcaatgttcattgcatggtaaacacttactaaatatgtgttcagtaaatcagccacaaagaacaaagtttggagagaagaaaattaaatagtgaagtgtttttaagatgtcaaaagaggtaacacagagtactttttgtctcagcaaattttgtggcttttgtcatttatgttaataattgctattaaagcatgtaatttcagactttatagttagatcttttgtatcatacttggtaattttacatttaaatacatgctatacattaatacagtaaatgaaagataatactagatattgggaattgttttctttaagtgtagctaaggctatatttcctttagcaaggtctatggggagaggtagccccacatttcccctgaaattgtactgaaggaaagcagaggagtggcaaaactctaaagatcactgctagagaaatcatattctgttcttttactagaaaatttctgtttactgcagtattgtgaatggaggtgaacctgaacctcacaggaacagcagagacgggtgctacactctgtagtcacagcacttgggaaactgaggcacaagatcacttgagctcaagtccaactgggcagcatagagaaggcattgcagaaagatgcggtggggggtggggtggtggtggagggggacaagggactggcagttgtaacaaggctacctgcggtgttttggacgtctttgcctaattaccttcttgttccctttttagagactacagctgcttttattgaacccattaaaagagatgtccaatattaaccatccagatattcgactcaagcaattagaatgtgtgttgcagattctgcaaagccagggagacagtcttgggcctgggtggccgttagttcttggagtcatgggagcaatcagaaatgatcaagggtaagtgtttaaaatggatacgcaacgtgtaagaggtcagaagggtgccatcctgatggcctgcagtgagaatttttatctctgccctgctgctcatgccctagctctccctgtcacagtgcttcataacctacccaggcagttctgggaactcgcaagtattgttttgcttttaaaggtatagaagatttgctgtttcgtgccatttatattagaatataagatcttattataagataaataatttaacattttataatgcatctaaggactccatatattaggaaattcttaagaaattgctttaaaatgactatttgtttcttaaacatttattctgtgcttactgtattcccagaactgagcttgtgggctcttccgagtacacaaataaatggccactcccctaaaaggggaatacagggaagaaagcactttactgtaagccaggcaaagctccagtggaaggggtggagccagagcatacggcatcctgtgtgtctaaaggctgtttgcatttactttgagtatgcttgagagggaagtgaggagtttacacgggaaagttgtagtcagatgtgcatttgacagagtccactgtgacaagggcacggagagagagcagcaagtgtgggcgtgtgacaggtgcttcctagaagtgacaggtgtttgaggtatgtaacagattgactggggacaaagggagacgtgcagtctagaatgattctcacacttagggcataggtgaatagtcaaatcccattaaataaagagggatccagaaggaagagcacagtagaatgggatgtggggttttacttaacttagggcagaacattagtgaagaaattaaacaggtcctgggtattcgtgtctgagatcacactgtcacacacactctagtgacaggggcactgcagtgttatattaaaactacagagacaattaatgatagtattagagaaattaaatgtttaagtatttgtaatagtaaatgtccttatagtccagcattctgagattattaaagtcaaaaagaccaatcaatgtgcatcaagttgaaactgatttccttaactcacaccacagagtagaacgtgtgctgtaaagtggcagggacccatgtgcatccagggctgagaaactctgcaacattgaagactcgattatttacgttacttaccatttgttccaggctacgttcagtggctatgataaacaccatggcctaaagaaacttgagttactgggcttacacgtcacagtcagagtccaccatgaagagaagccaaggcaggaactgccccagaacccgtggggacactgcttactggcctgctgtccatagactgctgagtaggctttctcctacagcccaggaccacctgtccaggggtgacacaggccatagtgcacagggtcctcccgcatcagtcacctgcaggccagtgatggagatagtccctcaattacagttctctcctgagatgactctagtctgtcaggtggactgaagaaccagccagaacaccaccaaactttttctccaagaccatctgcctcttgtgaaatttatactgtacttttctcacagaacggatctgtaattgtgcttaggtacttttaagaggtactgtgtagatattaaaaacagcagcagcagaggcacttaccctcggctactgagtaagcacacttgtgcatgtgctgggccacagaagaaagctttggtgcatgagggagaaaggggctgtgacagcctcccctctgcgctgtcacaggggtcctgggtcgttggttggtgctcagtgctaacactgatttccccatctctgcttcccaaatgtcaggattgaatctaatcttatttgttaatctcatcaaggtccctttactcttgtttatttgagaaagcatatgtaattatgtggctgttgaggtactgtgcaaccagggagggcatccctgttaaaattctaaaataaaagtttgctgggttcagattattgtaaagttttcctacccctttcttttaaattcatatttcccgtttcttttgttttcagagaatcattaataagaactgcctttcagtgtcttcagttggttgtgacagattttctacccacaatgccttgttcttgcctacagatagttgtagatgttgcaggtagctttggactgcataaccaagaacttaatattagcttaacgtcaataggcttattggtaagtactattgcctttttatgataagatccttttaaaatgatttatgcagttaacagtgaatgcttacaaatatagggtagacacttgaaatttttactgacttttaagtaccaagcatatcctccatgaattagtaaataatttcggaaacagtctgttagtagtgggacatttgaaacaattttgatattactgacctttgaagtttgagttttgctgagtttatgagagtacttcgtgaaacaataatagtaaatgcatataaagaaaatcatgggctggagagatggctcagtggttaagagcactgattattcttccagaggtcctgagttcaaaccccagcaaccacatggtggctcacaaccatctgtagtgggatctgagtcctcttctggtgtgtctgaagacagtgatggtgtactcatatacataaaataaataaatcttataaaaaatcatgattgatgtagtgtacaggttaagtgaccttaaatattactttcataacattttttcatagactatttaataacaaagctttatttactatttgtatagacccatagtctgtcaacaaaactgttagacacaggagacagcatgttgtagtggaaggctctgtgtatgttagcacttgtggattcttgaattatggacatttaaatctcatttcacatatcttgagtatggaattagtatgttagcgtattgcaagtgtttcatatgaatcagatatgaagagaactgcccccagtgtctgtagtttatctaaggaaattgtttagattctctgacctcatgttacagttgcgagagtgtgtaaagctgaacttatgtttctctcccaagttagttaagtagtttatttaggatctcctaaatgtttattgtgactcagagattccataaagttgaactttaaatttctcacacaaagtagttaacttggtatttttctatgaaaattatggccatggaagactactcagtcagaccctccctgctgacaaagagcagagcagctgactgactgtgcgctctaacagcactcagtgccttccctcacttcctgtggatggtcacagctctgtcgtcattaactcacatacttcactactgctgagaatatagtctgtgttatgtgaagataagaactggtttttgtatgatattataagttattaagtgatacaattatgttgtgatgctattgttttagttaagatcttaatgtatatcgtatagctaagaattataatgacaaaaaagaattctaatgactagatgctatatatatatcaacacattgaaattaatgatttctttctacttacacttgaagttttcataataaaaagtacaggacaatgaaagttagtgataaggcaaaataattcgccaccttttctttaaattagaggcgctgatgagggaaatgcttgtattgaatctcttctgaagcttagaacaaaattcgtgaataaaattatatttctatacttttctttttagtggaatatatcagattattttttccaaagaggggaaacgattgaaaaagaattaaataaagaagaggcagctcagcagaagcaggccgaggagaaaggagtgtctctgaaccggccgttccaccccgcgccaccgttcgactgcttgtggctctgcctctatgccaagctgggggagctttgtgtggacccccgccctgccgtgaggaagagcgcagggcagaccctgttctccacgatcggagcgcacgggaccctgctgcagcactccacctggcacaccgttatttggaaggtactggggacggtggggctgctcgttttccgctttcagtcacatgtgtacactttctaaacagtcattcctaggcgcttgtttattttatgtatatgagtacactgtagctgttttcagacacaccagaagagggcatcagattccattacagatggctgtgagccaccatgtggttgctgggaactgaactcaggacctctggaagagcagtcagtgctcctaaccactgagccatctcaccagcccaaacaaataaatttttaaagattgattttcattatttttactgtgtgtgtgtgtgtatatgcatgtggacgcatgagtgtgtgtgtgtgtgtgtgtgtgtgtgtgtgtgtgtgtgagagagagagagagagagagagagagagagagagatgcacacaagagcagaggtacccacagaagctagacgtttttaatctccattcactagtccattctctttctccctgagagggtcactagttccttaatgctgcaagtaaaaccaccaccacagttaccactgcttcaacttcctgcttttcctcctcctcttcctcctccgatttctctttcctctcctatactcaactgtccttctttccttctttctctttttgtgtctgtgctgggtcttgaacccaggaccttgtgcctaaactattagttcatctgtctgtgacattttctatttcgtaaacatatctactctgttcagtgctcctcccccatttgttcttattttcctttaagtgtaaaaactctccaagttgtaactaagttttgcttgttggttggttttctcaacacctcatttggtcctgaggtctggacatcccgtggtaatccgttctgcctggattcttgtctcaggtataatcgcagagatgtttccactgataacaagtcctggctgtgcgctatctgttagtttacttttctaattccgtgaacttaaggataagtttaagaatacacagttgccttttctagtcaattcctctaatttatgtggattaataaaactgttacatatttttataacttttattttctattgctatatcttaagctaactcatcaatatttttatatgatttttaaaataaatatttaggtactctttcatctactggaccgagttcgagaatcttctacaactgcagacaaagaaaagattgagtctggaggtggaaatattttaattcatcactcaagagacacggcagagaagcagtgggctgagacctgggtattgacattggctggagtagcacggatcttcaacaccaggagatacttgctgcagcctctaggtgtgcaatattgtctttctctgcttatacaactaatctgtgttaaaggaaagttggaacacacttaggaaactctttgggaattgatatattgtactagaatagtcagcagtcttaactgtaggccttacttgatgtggtgtacatgctcgtttcatcgaggggaagaacctgccctggacgcacctttcagagtccagtggtgaagagacacacacacacacggctggacttgagagaagagccgtgattatgcccttaagcccacagtgactgcatcatgtggtttccacagtgactgcatcatgtggttgctgggaatgaaggttgctcgctagggttggccttgcactccggcctaaagttttattattatatctaagtacactgtagctgtcttcagatgcaccagaagagggcgtcagatatcattaaggatggttgtgagccatcatgtggttgctggggtttgaactcaggaccttaggaagggcagtcagtgatcttaaccactgagccatctctccaacccgggatgtggtatttttaattatcatatttattatgtatgggagggcatgtgtgggcattctgcctcgcatgagtggtggaagtggaggttggcttgagggaattgggaagccacactgtgtagctgtcctgactgcacctgatgtctcactgtaggagtgtctggattgtagaggcaggctacccatcaggcattgtggttctgtggatgaggctcagttgtgagtcttgtgtggcaagtgccttctgctcagccattgtgccagcccatgggtcatagttttagtatgttagttcctaattttattcttttgacttctatgtcaatgtaagcagaagataaagcaactatgcttcaaagtatctgagaggatttgctcattgaatactaattgactccccccccttcattgatacaggagacttctcaagagcttgggatgttcttcttgaccacatccagtcagctgcactcagtaaaaacaatgaagtgtccctggccgctctgaaaagcttccaggagatattacagattgtgtcccctgtccgagactcagagaagcccgagccccctgccgttagcgtgcccgtacccgtccttctaggaaacctttccggcccaggcctgagcaggccgtttgtgaggacagactccattggagaaaagcttggcagatgcggctcggagacgcctgtggtgactgacgagctggaagatctgaagctctggtgggctgcctggaacacctggcacaggactggatctgaaagcacagagccgcccagctccgtcgatgagctgacctttatccccagccagcctttccttacagccttagttcagatcttccctgccctctaccagcacataaaagctggcttcagcatggccgacttgcagaagctgggcgtcatcctgcacagcgctgtctctgtccccatcagttctgacgcctctcctttcatccttccgtcttacacggaagcagtcctgacaagtttacaggaagctgtgcttacggccttagacgttctccagaaggtaatgtgatttcagtgcttgcctaaaagctgtaaggaataggattctttggatttttattttattgttttgtggtaaatttcagaagataaatttaggactttctgagattgctatgtatgtacactttgggataaatttaagattgtcaagatttttaaaacttattcttgagatagttaaaaaagtaactcaggtctgttttgagttgttaagaagctgcttgtcgggcggtggtggtgcacgcctttaatcccagcactcgggaggcagaggcagatggatttctgagttcgaggccagcctggtctacaaagtgagttccaggacagccagggctacacagagaaaccctgtctcaaaaaacccatataaaaaaaaaaaaaaaaaaaaagtaaaatgccttcatgggctggagagatggctcagcggttaagatcaccaactgctcttccaaagtcctgagttcaaatcccagcaaccacatggtggctcacaaccatctgtaatgagatctgacgcccttttctggtgcatctgaaggcagctacagtgtacttaggtaaaataataataaatagatcttaaaagaaagagagaaagaaaggaaggaaggaagaaagaaaagaaagagaaagaaagaaagaaagaaagaaagaaagaaagaaagaaaggaaggaaggaaaaagaaagaaagaaagaaagaaaggaaggaaggaaggaaggaaggaaggaagaaaagaagctgcttgtggccgctacctcgctacctctagtcaaagttaattctgaactgtgggtagcctatgccaagacacaagggtgagctggaaaaagtggctttcttactgcagatttaaattctgtatttttagctgtgtgtcttgtttttttacaacaaatcaataaatagatatgaaaaatagtgaataaatccagactgggaagcaagaccatatcaaaataaaagcatttttttagattatccaggaaattgctacctcagttcataacaatcaagatcctaaacaagggctaacaggatggctaagcaggtaaaggagcttgccgccaagccgtattatggtccctaggacccacatggcaggagaacttccaaaagttgtgccctccacacacattacaaggtatgaacatatacatgtataaatgtgctaagaaaaagaagaaaagaaaagttatattcccagcacttggaaatctgctacaggaaggtttgcatgaagtttgaacccacccttgattacaatgtgagactatgtcaggaagcaaacattaacagaaaaggccaactcagtaatcagccaagacgtgagagagtcatggtctgtcatcaaggctcatttgtaaggagacagtcctactctctagtcctggctcctttattccctggacatgaccacagcacccctacactgccctgaaggcaggcagactaagcaatagtctttatctatttaaccatagttccattgttcaggaaacaaattgtgactaagatgagaaattaacacaatctgacattcaatactgtttgagggacatgaatttctatgactcaaagtaagtttgtagttcatcatccttgtgttaggattttattgctgtgaatggacagcatgaccaagacaactcatattaaggacatcatttagttggacctggttcatagatgttcactccattgtcatccaggcaggatgtatggcagcttacaggcaggcatcacaggagtactctacatcttgatccacaggcagccaggaggagactgccatccacgctggcctaacttgagatacatatgacacctcaaagccctctttccacagtgacacacttcctccaacaaggccacacctcctaatagtgctactcatgggccaagcattcaaacacatgagtgtgtggggaccaagcctattcagaccacagtactttccctctgactagatcacacagctacattgcttatgcctttccctgaagtgaatgaaaaagggtttctatcagaaaaatgttgtcatttggagaattcccaaattcttggactcccttaactgcacattcagggctgttatatatgcatagaaggtaataaaaaacagcacacaccctttaaattcaaggaaaaccatgaaagtttacttttgaataactgctttagcagaaaaagaacaaatacaattattcattgtggctactgggaatttatctgagctttgactctgaacacaaaatgtaatgtcattccaaacctgaaaacttattcctgtcactagaagcattctgcgtaattgtttcaaagatgtatttatgtttcagctctaatgcctgtgagtatgtagaccgggtgtggggcaaaaatcagctgttatgtccatgagcttacagcattagagagaagtcagcttcatcttgacccactgctggtctttgtagcaaatgtcagatgcacaccccagtctcacctacttgtcataccaggcttgaactttcccctctgtgttagagagtaagtatgagttcactaagagcatctttaacctgactaaacagtgtgaggctgccttttgtttagtgactgtttagaaagcttgagttcccagtatgaaaagacggcagagcacatgggattctcaagggtctgggtgagcaaatgcatccacagggaggaatgcatcctaatgttcacactttgcttcccaggccatctgtgttggaccagaaaacatgcagatcatgtacccggctatatttgaccagttgctggcgttcgtagagttttcctgtaaacctccacagtatggacagctggaaacaaagcacattgcaaatgccaagtacaaccaggtagctcgcaaactgtgtctgttctgtagtaagttctagatgagttccagtccagatagactgtggttacctaaggaagcgctcctctgtgctcaggtgtcccttacagaacacaagtgttacccgagacatcgctctctctctccagagggtccttctcagaggtcgccctgccctgcgctcccttctttcctcagaagtgagagctcctttccaccctttctctttgcagccccattcttctacaaattgggtataaacccctaggcctggtcttacctttaaatagatatctacaatgcaagatgaagaaatctgtgtgtactaaacaagttgtccattgctggtgtgaaatttagttggattttacatccatcccatcgccttagctggcagattatacctttggctaatttataacaagagtagatttttgaacgcacgcactgctgattttcttcactcaacataagagttataatttatagagtccgaaaagtagttctaatgtgtattaatttttctcattctatttgtcttgcatcacaatggaatcacaatagatccaactatttgcaccggtgagttaaatttcctaaccctgtcctaatctgctgccaacacagtgcatctccccagtcttcatagagggctctgtgctttcccggtagctggaacttttgcctgaatgagaattcttttttatgacgtgcatttgtttttttgaaaactttgcatgtaatgtgatctgatgtagaaccaaggcctgaacttgtaaggaaaaagagcttccttctcaaaaacagtatcatttccttcagacccttcccctctaactccatgtgaaaatattactttctaggcggaatgggtagccttgaattatgtaccgtttgctgaaagatctttagaagtagttgtggatttgtatcaaaaaacggcttgtcataaagcagtggtgaatgagaaagtcctccagaatattattaaggtaatgtatcttcttatctctataattttacatggtattatacaattattgaaatttctctaggcagtatattgggataaatgaataaaacatttgctatttatagtgacttcaaatacatggattgtatttggcaagcatattttttattatatgggatgttttggagtggagtgagggtacttcagtagtagggcttgaacctctgaaatgccaggaaatgcttttctgctgaattctacctctagtctggcaaggtcaatgtgatatagtccttaaaagagtccttaagtcttacgggagctcagaactcagagggagtcagtttgtctgcttagctgttgatgaagacttgtcttgagaggccatatgcagaacaccacatttgggtttctctttaaagattaaacatttgttcactatgtttctccttatttcttcactttccctctgtttgaaggacaatctaaagctaaactccttttctaggtttcctattcttgcatgattaatttattgcagtattagaaaaagcacattgaaacatttgagtaaagtgtaaaactcaaggaattttagttctcaaacatgaaagtatctcaggttgttccctctcccctggccactgggaacacataggcagcattggcctcttttgggcaggcaggagacctttagggactatgctttctgctgggagagccacagcaggatagttgcaaactggtacattttctgttcctaactctttgtaatagtatccttattgtgattttaaagaaagagaactgaggttcaagaagtagttaatgactcgtgcttagatgagaccgtggtaaagctcatggctgccgcacagtacttgggaggctgagacaggaggatagtgatttgagtacagcctgaactacattagtaagactgtccaattaaaaacacacatatgctgcttttagagctgaggttagctcagtggtactggtcattcttggcatacagaaggccctgggtctagttctcaattccaaacaaaacgaagtatgtctgtccaggagcgtcagtctttcttgaccgtctttcagtgaaaatcttcatgctgtgctttcatggatttacctgacttttagttttgaatgtcgctgtgtggattttaaccaaactgaactttctctccagactctcagggttcctctcagtttgaagtattcatgcccttctgaaagcacgtggaaactggcggtagcctctctcctcaaagtcctgtccatcggactgcccgttgcccgacagcatgcttcctcggggaaatttgacagcatgtggccagagttagccagcacgcttgaagactttctctttactaaaaggtcaggtcattggtctaaaatggagcgagagcctttaaggagatgggagactatgtctgcaactgtgcagatgggggtcttactctctctccactgacagtcactgactgctgggctgcacacacaactggaaggatgtgtctgtgccttaggtactttgtcactgtggtgggaagactagtgcttgatgcaggggacctggtgctcagtgtatttttacatttaaagtgtacaaataaaacaaggcctgctaaccatctagctgtaggcatatgtatactacacctctaaactaaatgcattgatgctattttatacatataacataaaagaaaattatagagacttagatgtcagataaggaaggttcctattggagccttgcgcttactggggattgcttgcagatgcgttcttaggcatgcacagctttggtcttctcttctgttgacgaggatgatactgcttagttcttggggctgcagtgaggacacatgcgagtaatgcagacaaagctcttacaaacactggctgattccagcaacagttaatacttaagctgctcttaaacagtgaatacttcaatatcctactcatttgtgattatcttactatccatgcatcagaaagtctagactcccttgactctctcagaactattgactatctgttcttgctgtaaccactttgctttagaaaattaaattgggcctttcctttatgcatgttctcttatgtttactctaaggaatttaatgtattgtcttacaaaataataatgggcttggttgagggtcatttctgtcactatcagatagcataaataaaatcagatgtcctctcaatggtgactcaggggtggggggcacctttcttactcacactccactgggagaagtttagttttacagatgttcagctcaagattgctccgagtatttaacagatcatttacaggaagtactgtaatttagcagcggcttcttttgagtgagccgtaatgtctcagcctgagcaggaagagctaatgttttatcacttgagtactgcttatctccaggttgtccagaaaatgaaatcaagtctttcttttttctttttagcatacctccagataatctctctattcaagaatttcaaagaaatgaaagtattgatgttgaagtaagcaagcttagaaaattttttctgtgttttatactgtatttgaggatgataaatggaatgtaaagattttaatgttagtagggaagggcatgtgtgtgtgtctctctctctctctgtgtgtgtgtgtgtgtgtgtatacctgtatgtgtgtcagaggacagctttgcggaaccttccactttttcatgggttcagcacctgctgagctgtcttgccagccttgaggggttttagctgtgaagctttggttggggaaggaggtgggatctgttatctttgaggtagctgaatgtttacgtaaatcaaatacattattttctcatgtagacttgaaagtgtagccattgtaaaagtctcgcctatgtgccattgctgtttaagcctcatgtaagcttttttttttcctttagaggataaaataaactgtatgttaggacacagtatgcaacaaaaatgaatatgactttaatttctcatagttcataatttctggttatgaaaaataagtttaacgttaattttggatatttaaatgtgggtgagtctcaaatatggctgagcatttttctatatatttgtggttgggtgaagatcaacatatgttcaaactgtagcacagtaaaccttagtgttgactctccttataggtaagatggatgaagaggcaggctagtggtcatgttgtaggaacagtaaaacgttcatgtactgcggtcagagaagggtcgttactttttcaaaaagtaaaatttagctctgactctagacaatctcatttgaatcggccgtctcttccgaaggaaaagtagatttggcgctctctcctttgctgtaggttgttcagctcatcagtgcggagatcctcccgtatgccaacctcattcctaaagcgttcgtgggtcagatgatgaccatgctcaacaagggctccatccactctcagccgtgctcattcacaggtgcgtgactcggggccgcttacagcccgagcgaggatagtcacatgtgtaagtcatgcttcagcgtgggacgtagagagtgagggttataccgggaaatggaggcgatcatatacgtaagctctgattaagtgagtcacatggggcttctgcagtcggatgaattatgcatggtgacagaatttactacattttgaagtcatggattattgtaaagagtctagtatagaaaaaaagagaatattctgccacttagaatgttggttttagtagggaaaaagtttcttaacatttcttaacggagcaaacagtgagtgcctactatgtaccacactgtgctagagaggtgtctcactcttgggaacatttctgaggatacataccacagtatgtataaagaacacactccattcattatgccctctaatatgtctaaattttgttataatttctggttattaaaacatgtactcagatctcagaagtaactgtgacacaatgggatttttttatgtgaggtcatacatttttgcaggttattttctatccttagtcccaacctttactagagctaccctgaccatttatacagtttgaccactagatggctctcttgctgcttacttcacaagccaagggttttgtggttttttttgttttttgttttttttttttccactcaccccagcatttcaaaaaactggcctgcacagcatgggaatttcagagaaaaataattaagtgggcttattttttatataatacttatatttaaaatggtagatattctaatagagtacaattaaaattaggtacaaatatttcaagggctgaatcatcaggttttctgatagcccgcctaccaagtatggtgtgacgtgtaccaaggccaggtagccctgcctaccgtgtgtggtgtgagcacagcaacactgaaagaaagacaggcgctcacacgcactccaaggactgcataaagaacatgctgtctcagcttttcctttgcgttttctgtaaacacacacagaaagacattccatgctaggcgagttcctagggtcacttggttcttggatctttagcatggactgatggccaaacttcacagactctcagggtttcggaaggccaaaagaaagaagtaaataaaagaaagaggttcttccagaggggtgaaggagaccatggggggggcggggggagtgtggtgcgggcaggcacagcagtggggcagtgagctgagaactcctcaaccccaggcgggagactgagagtgaaatcaagggctagagggggagccgactgagagagagaacatgtgtgtgctgagagtggtgtatggctctgaaacctcaaagcccacccctagtgacacacgtcctcactgaggccacgcctcctaagagtccccagcagtacttctgcctgtggagtgtgcagtgttcaagttccagaaactgttgctcaaaccacaggagtgaccaagaacatagagcagaaaccggtgggaaaatttgtgctaaactaagatcagaaagaaagaaaattagtcagaggcgtttatcaggtacctctgataactgcatcttcctggagggaacagagaaatatagaaaagggaattgctgaagactaaagatatcctcaccttagagatgataactctgtgcccaaaacaatgaaggataaagatcacacaatatccacacacttaccataaaaggaagatcagtcactctcagccacaacaacttttcaaatggtctacaagttctccaggaactgcgcatttctcaaagacttgacatgggggctagaaatggagagttctcaccatggaggcgtgtacctaggcacagctgggcaggtctgagtctaggatggtagttctcatactttagcagaaagggtgtcctgttcccagggtttctgcctcggacagggtgggataggagagttcccacttcccacaatggctctcgagcagctggaagccagctgtatgtcttacacagtaacgtaacggcagcctcagaagaacaacaaaggtttattttcctccatcccttcttaggaagccacttccagatatcttcatgaagcagggtaaaccgagaaagcaggaagctagggttctgggagacatgagggagaacggcgttggccaaagactacctgccagttatggctaaagaagttgactaggaagaactagtccagagcagagcaggctcatgctcctgaaaacatgtggctagggaaggagaaaagatggtaagacagaaaaggcagtaagtgtgggttttgacttagatgaagctcttgagaagtttgttcgggttttgtcattgttgtttaaggtgtcatctcaggtactccaaactgtcctcaaaaaatgcatacctcaatgactggcaccaaacttcctgtgcagcctagagtgcccttaagcttttcattctcatgctggagttgccggcatgccaccatgtctactttatgtagtactgggtattgaacctagaatccaaacgcagagcctcgtgtgtactaggcaagcattctgccaaccaggggacactcattgcccttaaaactcactttatagccttgtcacaagataagaaaaatgttgggaccaacagatagatactggccatcaagcctgaagccttaagtgcagtcactagaatgcacatggagagaactgactcctgcgggttgtcttctgccttccacatgtataatgtggcatgtgcacatgtgcacacacatgcatgcacacacacgcacacatacacacatgtacatacacaagcacatgtacatacacaatatacgcacatgcacatgcacacacacacacatgcaaacacactctaaacaaaggaaaagcaaaaagaacatgttgattatgggcagcctctctttgcaccttcctagaggaaagattgttatttactagatatttactaagtagtattaactaaaggttgttcatcagtgcctttcatcttattgatatccttattcctagcttgctaggctcgttattaatgtgcactgtgttaacattttttaataatcaaatgttgctaattttacagaagcagaaattgacattcgtttgagagaagaattttctaaaatgtgttttgaaacattgctccagttttccttcagtaacaaagtcacaacaccccaggaaggctacatctcacgaatggcactctctgtgcttttaaagaggtctcaggatgttctgcatcgctacatagaggatgagaggctgagtggaaaatgccctctcccaaggtacgcatttaattaaggaggaaatacattgatatcataatgagtagcaaagattgctcaaaaccaagagatttcttaagagaactagatggaactgaggtcattggtaactgtatgtgccctctacagtgtaaatattcataggttttgctgcagacacataacacttgtgatggtgatgatgacgcttcaggcctttcttgtagattaagaactatgtgatagccggacagtggtggcgcacacctttaatcccagcacttgggaggcagaggcaggcggatttctgagtttgaggccaaccttttgaatctaaagaatattgaatctgaaaatcgaccctctgacagaggctctgcatgagaactgtggattggcaagaaaacacaatctttttctataaagggaaattaagagactaattacttctagcttatttttgattgacatttcttgatttctgtcacctgttcctgtctttttttttttttttttttttaaatgagtaaactgtagctgtcttcagacacaccagaagagggcatcagatcccatcacaaccatagatggttgtagtttctgggaattgaactcaggacctcagaagagcaatcagtgctcttaaccactgagccatctctcccacccacctgttcctgtcttaaatctgttttttctaatctgtttaacaaagcccctgcccctacactgatcccttcttgtatatccagcttgtatttgtggcaggggctgcagggctgatctcagttgagctatggactggaattcaacaacagatatatatctccatccgttttaatgtagaaactggggtttaagtctatatatgtgtgtgtgtgtatgtgtgtgtgtgtgtgtgtgtgtgtgtgtgtgtgtgtgtgtatgtatatgtgtgtgtgtatatatgtatatatataattttgtttaatgtagaaactggagtgtaagtcaaaggaaacagtaactatgaaagggcagacatcctcaggtcaggaaagaattggggacagtgagcccctcatgatgagtttctggtagaaaccgatcagccatgatcctttgtttgtttctgaagttggaagtggtctgacagaggatgtggtcttcttgcttcatcatgcccgtgtcttactagcttgctcgctgcaggtctgttccaggttagatctccccaggatgatatgaatgcctttccctcagtttttaagattttaaaattctttactcatttagagtttattttacagttttctaatttgatgagtgaaatcacaaaattacattttaaaaaatgaccaatacttattaactctctacaatcttgaattttaaatttctagatcataaattataggcctctgccttcagacgtgtatatacagaaacatcctgaggcagcttactagtaatttgattatggacatgattaaagttgattcctgatatatacatgaaagtacagagataaaagctgctttgagtggatattattactagatcataaatattagttcagaaaacatctttttttcatttttttgtgttgaagatgtaacagcttctttaatatttcttttaaattttatttttgtcatctttatttatgtgttagtatgtggacattagtacaagtggctgaagaaaccaggggtgagtgtgtaatgtcctgaagctagagctgtaggcagtgtgagccgtgggatgtaggttctcagaatcaagcgcagatcatctgcaagagcagtccacggtcttaaccactgagctgcctcccccactctacctgctctctgtaatctgagctcgatttatagtcatctgatgaagctgtttcgttctgtgtcacacacagcattatgtgctttctacaagtgacatccagcatcagtctgcttgcacaggccatttggtgcctggggtgcagcttagtccccaaaccacatcaccagggcctgctcgtgaagcttctcgtctcagcagacaggacactgaggcaggaggatcagaaattcaaagtcatccccagttacaagtttgaattcagcctggggaatgtgggagatcctgtctcaaggcttgatgtagtgccctgtgccacactggatggccaggctccctgtgggatccagatctgtaccagcaacccatgggatggaacaccggggtgttcttttcacctttgcatccttcattacacgcttattggttactgttaaatactgctaattggccgtctcagaattaatgtctggcttgcttcatgattgtcgtcatagcagtacagtaagagaggagaagcaggcgagcgtcactgcagttctgagagctctttcagcagcagataaaatacagagcaggggttagaaggagctttcccatttcatctttggcagatttctattaaccagaaaacaaaacatcattttgtaggaagttttaaagcatgtgttgtaaaatattgtagtgactctcgcctttaatcccagctctcataaggcagagtcaggcagatctctgagtttgaggctaacctggtctacaaatcgagttccaggacagcaagataacccaggaaaaaccaaaacaaaacaaagcaaagcaaaacaaaacaaaagtaactgtagctagtggcagggctgccctgtgaatgcaggttttcaggaattgaattgctccactgataattttggtaagcttaactacaaatcagacttggtgaggcaactacagattggtagcaaccacggcactgatgtgtggattgttataagcttgatgagtttgccttttataagaatcttaacctctttttatttcattgtagtcaatatttttctgaaattatatctatttgtacaaactttgggagaaaaaaattatttgttgtatcttaaaaaatcctaatggaaatcatctcttacttatcctttttaggcagcaagtgacagaaatcatattcgttctaaaagctgtcagcactctcatcgactcactgaagaagacccagcccgagaatggtaggtgcttgaggacttggctgtcctcccagacattgcacatctgtcctctctgtcagggttatcactgtgtggtacctttgtattgtcactaaggtaggggaatgtgagaacgtagccccattgtgttctttgttctcccgtcctctccatgacaaaaactcaagtcacatcaactcagtaaagttaacttgaaagctggtaggcctacgagacacccttggctgacaacctgactttgataagaatagaggacagccagctctgtgcatatctaaacatttatatcagagacataatgataaaaaaattataaaatattttatttttaagacaatagtacctgaagaacacctgaggtgctatctggcctccactcatacatgcactcacacacatacatgtgtacaacgcacaaatatagaaaaaaatagcagttggaatcatgctctaaacaaatgaagtgactttttcattttgatgtaaccataagttatggtgatagattagaaaagtataataggcttcatcaagaaaagaagaaggatgccagcttttctgtccgaatcatgtggattgcatagccagtccaagcctgatgcaagagttggctatcaggtgtagaaccaacaggctccacatcgatttaaactttttattattgtcttactatagtgttgttgctggaagtgaggtgtttggagacttaacattttttaagaggttttgtttttattattttgtttgatggtaagtttttaagtaggctatatacatataaataacttaaaacagaggttctcgctgggtaagggcacctgcaccaaacctgagagcttgagttcagtgacgacacgataggagaagaaagtcagctcccacaatcatgtaatacaaaatacatactccaggcacccccagctttccatacaaataaataacaatatcccctgtttgtaatcacctttttcttgtctatttttcacttaaacattatgtatattctttcacatcaatacatgcatctctttaatattctttttgtagtttgaggtttgggaagcagagtcacatagaagtcaggatggccttgggctgctacctctcagcagagggtgaccttgagttactaaccttttttctctacctcccagtcctggggtacaggcatgtgcgggtacacctggctctctgtcaggaaatcccgcagaaatcacagtgggctttaggataaacatgctgtaagaactgaacctgagtagcctcccccaggttctgttgggtgtcatcttcgtgtatctcctctaacaagccgaggggtagtgtagtggcttgactggtcgggtagagccgccatctgtatgctcttccaaaggcagctggaacaggccagataaacttcctagagcagtggtgcctggcttttttgttttgttttttggtacctttgctgatttttttttaagccaacctctaccccaaagcaaaagtaaaaagaaatatggtgtagattcttctttcattattattacataatatttaatgtgtgtgtagagcagggctgaacactgccacacccacatgtgggtcagatgtaaactgcagggacttggttctcttcctgcagtgagtgttaggatcacacagacagtaaggtgtggctgcagccttacttgccaagccgtcttcagggtcttggttcagatcttcacatttcagtaggtaaacaacagaagtgtgcttgctcatccaccatcccctatgttcaccgtgcagccccttctcctcttccagccctgtcctgaagaagcctgttcaaaaacggaggtagggctggagagatggctcagaggttaagagcactgactgcacttccagaggtcctgagttcaattcccagcaacctcatgggggctcacaaccacctgtaatgagatctgacgccctcttctggtgtgcacgagagtgacagttattcacagacatgaaatatcttaaaagaaaaggagttagcagatgcatagttttccacagaagtgacctaaggaaataacattagcactgagcagtgtcagacacattagatgaaaaaaacttgcataagcatctttcttgggaaactgaattatataatctgagtcggcttctcaaccgtaagcttctgagctgctgggctttaagaggagagagatatgaaatgtgaaccgagctgatttgaccagggcttgttccagaaattgagagtctatgtaaaggaacccctttccttatattacatcagaagagctgagacagagaacagttccctgacgtgaccagaataccaagctctgccttatttcggggggtggggtgggggtgggggaatgttaccacctagtaaattagactaaagtatggaataattataaaaagttctttgagccaggtatggtggcacatgcctttaataccagcacttgggaggcagagacaggcttatctctgagttcaaagccagcctagtctactgagtaagttctaggacaaccagggctacacagaaaccctgtctcaataccgcccaaaacagggggcgtgttttgtacactttcatggtactgtttcttgtgtgctacgctgcctcccagactgtgggtttgttccacacagtaacataacatctgccagcaggttttatgtgaggattgaacactacaaagtacttaccagagaatacggggggggggggggggggtcagcctgggtaacttgctgagatactgtatcagactaaaaggtaaaagagagggcccatagccgggcggtggtggcgcacgcctttaatcccagcactcaggaggcagaggcaggcggatttctgagttcgaggccagcctggtctataaagtgagttccagaacagccagggctacacagagaaaccctgtcatgaaaaaccaaaataaaaacaaacaaacaaacaaacaaaaaaagagggcccaaggttcagattagcagtataacacttgtgtgtacatgactctgggccagaccccagcaaacaataggtactataaaagtaacccgtgatttcagtataaacagattactggttctggtgggtcactctgcccacctgatgaagagcatcctgttggtggatgaggttaggaaagcaggctggctcctctgcccagtctcgtgatgtgcattaaagactagcaggctctgtaagatggctgcatctgttcagtgacttgacattcaaatcgctaccaagggcattactgagtaggaaagtgcataaaaaggttttctatttgttcttgacacgcacactatgttttctgacaactatgcagaaaataacattttggaccattgtgttactttaacttgcaaagttcgttggtctctacggctgtcctcactggtcatttctctcttcctcttaagagtttacttatgtttatcttctgtgcatgaatgtttgccagaagagggcactggattcccctgaggctgaaattagaaatagctgttagctgccatgtgggtgctgagaaccaaaccctggtcttctgcaagagcagccagtgctcttaaccacggagccagcttcagccctgattttcttacctaatttctaagtacacaatactctattatctcctttttcatactttactaattatatcatgaagtcttataaaattaagaaattaaaagatgcttgtcgaaccatttctgttatatctttaattgtgtttatgtaaattgggtgaccgtactgtgatctgcactgtattttgagacatttctatttgtattctttgactgcagttgatggcaatacctggtcacaagtgattgccttgtatccgacgttggtggagtgcatcacctgctcatcctcagacgtcggctctgccctgaaagaggcactggctccctttaaggacttcatgcagccgccagcatccagagttcaaaatggagagtcttgagcagctgcagcacgtgtggaggaagagataccctgaggaacgccttccccggagtcttgtagaggacggacgctctactgaagtcactcttggcagctgtgtttgccttctttaaattaaagtgtaattatctgggtacagtaattcatacaaaagcctccatgttaaccagggctcctggaggagctgagcctttgcctgggtgaccgtgctgggagggacagtgagcactgcttcacacctgctaccatgtcttcagttggtgacttaaaagtgagcttatgtacagtttgttgtgtatgtgttaatgatgtactttttaaaaagaaagaaatgatatttccattcagatttttgaggctggtgttttgcaccctttttcaagtacagaatcatactaaaattttatgcaaggtggtactataacattccatactctctacaaccagcccttgagaacaaagggaactgacaatactgtgtgtataataaacaggacagttctgtataaaacagttgcatttatttaaaattttaaaatactgatgatgctaaatgctcgaagctgtatttattattaatacaaacttgtttgcttacgtttctacttctgatttgccttcttgtggggcagataagcttaccgtgtactcgtacagatggcttcatgctgtttacatgcattgtcggtgacgagaaggatcgagggagtgcaacagcagaggtatgatggctgactgcacctctggaatgcaggtcctaacgtaacagagacatgttgtagcaggatgaccggtcatacctcactcctttcagcctctctctgaactctcatgcctctttttacactgctgtctgaattttaaagacttttcatattttctattcctatgctttcaacatctgaaaggcaagatgactttatacttcatgaaacttttctgtgaggttttgttcttctctgttcttccttttctgggttcctcccaagaggacccagcatgaggctgacccacagtctaaagcgcgtgtcccagggcaggcgagtgctggaggagagcagaggctcgctgcgctcaggaggggctcctgctgccccaggagaggactgcagcagggcacgggcctctcacgaaactcacgttgacctagcccgctgtaggttttttaattaattatgctgttacaatattttttccaagtaaaaattttatttcacaagtgctggagacatgaaacatgttgaaaatgttgctattaataagaagtgatagtgaggttaatattattttaatgcactagaaagcttttgactttaacaagattataaattttggtctctccaaaataatcataaacctataaggaggtgttagagttgagtaatcactgaggtagttttgaggctattttaattatgtaatgatttaatttgcactatattctttatatgtgtgacaaggcctattttgaaggaatattatttttactcacatgaatcaatgaatttctattttattattttacttagggttaaggtaaaacatggtatttcatagactctgctgtcagtgttttcttaaaggtgtaaaaaaatgactcaagccgtgtattttttatattttgatatactcacttgtgaattaaagaataggactatcactgataaagtatcaaaatagtaagagtggcaacattttgaaaatattgccatgggtttctataaagtcagtgtccgctcgtgagaaggaacagaggattgcaacctgaacagcccttctctgaagctatctgtgagccagggctctacagcacacccttacctcggatcatctgagctaatacagtattagttttcaggaccagcgagcgtcgtgctgtatagttcaaaacataaaaatgtgaggcatgggttaatgtgcagtaaccagtgccagtctcaatgccaagcaagcgggccactcccttggtagaataacagccccctccccccaatccctctcaacccgcaaggagtgagtcccagtcattaacgcttttgggtcacacatgcttctaggctaccttttctgaaatgtgctggcctcagagtggttaacatggtatccttgtcctgtaaacatgacttgggtttttcagtccatacaagaactgactgcggggttactagatgcaaggatatctctaaagcctccaccacgaagcaccaagttaaatccccttcattgccttcctgtccccacccccgccccacccctgtctcagtgcagtgagttttaaatctcagagtcttcaccactgaccccctctgttagaccactgaacgccaggctgtactaacagcggtgcagtcatggagggctcaatagaactgtttgctggcacaggtcgtcctttgggctctggtggtacaaccactatcaagggagaaagggcaattccgtagcgtctcagttcttcaggattaatcttaaggttttgttttactgcaagcattttgcataccatctattaaaagcctattgtgtgccaaaggtgggggaaaacttgttattaagtctaactagaaaagaagtgcttttaacttgtttatatttttactacactaacattgatggtctcagttgtttcctcacaaatggttattaagtcaacattctttaaattatatagagcatcagaagaaaacagtggagaatttattttctttatgttatcatagtgactaagtcactttaagcagcagccaataacagttatctgtcctttctcctacagtatttagaatgttatatttattgtcggtttggtaccaccttgtcccaggtgagcatttggccaatggtcagctaaaaagctgcaagtgaactaataaactagagaacattgcaaatacatcccttgtaatgaaacacgcatgacagtcatgtcattaaaaggcgccattgaatactctcctcaaacgtagaataattcatgtgcagaaccaaatccgtaagagttggctaagggccgctaaactagaaccctttcaggaaatacttacctgtgactgccactgaaattaactggaaatcaagagccaagatagattacttttcagcctcagaatatcgtgaattataggtttttctaggaaactacctcgaggtagacaaaaacagtctgaaattaactggaaatcaagagccaagatagattacttttcagcctcagaatatcgtgaattataggtttttctaggaaactacctcgaggtagacaaaaacagtctcgattcagaagcatcgccaggagccgagagtgctcccacttatctgccaggacccgagagtgctcccacttatctgccagcagccgagagtgctcccacttagcagagttggctgttgcagctacttgtcaaaagtatcgcagttgactatgcatagtgctacaaggctatcttcattagactgaactgattggttgggtttttttgttgttgtttttaagttattcataagaagaacaggaattatatgacacattgtattactgacttacgtatggtgaaggaatagttttcaatcctttatggtcatttgaattaaacaatttgtatctctggagagtagagtggtgcttttattctaatgctcagtctttgtaagtgggaaagaaagttgtgagtggctcctaatttacatgtaaccccctcagaagacttccacgaaatccagtcgtttttactgtgttagcagtgtctgcatagctgtgcggataagctggatgtagtggctcaggcctgtaagcccagcagcgctcaagagattcccacgaggagtccaggccagctagcactacacagggaggccttgctcagaaagcagacagagcggtgtggtgctgcgtctcattgggactcaatactctgtgatctcaatgtggtgggcagagggcctgcctcccagttcacctttaagcagatcctctaagctgctgctttctgtgtctcagacggtgatgatgccgagtcactgcttctgtagacagatgcttgagggcacagtggcacccttgggtgcttgctcgggttgtgtggtgatgcactcttacggccaaacaggatctgaatggtttttttctttgggcagcactgtcattccgtcctgtctagattataactttgcctcacttcctcctaacctttatttatctctgcagtcctttttattctctacccatcccttctctcttcaggggactctgacagagaccctggcgacggccttcttgttgatgagattgtagcgtgccttctcttcggccactgttgcctgtttactgcgctgaagtcccctaccattttaaacaacagaacaatgtgaagcagttggaggctgttgcctactgtatgtctgagtttgtgattctgctgccaagacacagaacgggattgctataaataactggattcagtagctaaacttggaacagttaggtctgcactgccgcgaacagcaaagcggtgccacttctctttagagggagtatttaaaacttgtaggcatttctgttgtggcttttgaagcagggttgttttggctttggggaagttcctgttttgggaggtaaacactttgaatgtgggtaagtttatgtcatctaaatactaatcctggtgatatgtgcactgcttgcttccagggagtgttgtcatttctgtttcatctgtgtctgcgtttctattacaaagcagtagtttggaggatagtgagacagctcagcagtcaggagcactggctgctcttccagaggaccgtagttcaattctcagcaaccacatggcggctcacaaccatctaactccagttccaggggataggacgccctcttcaggcctgcctggccaccatgcacacacgtggtgagcaggcatacatgcacgcaaactatgcacacacacaattaaatcctgtggctagcaattttgattgaaggccagagtgttttatcttgtttctgagtactcctggaatatgttggtatctactgttgctcatggtgacagactctattacactgctgggaaagatgggatccttgagtaagaaaaggaacattactgaattttgagatcattttcagttgctacaaatacaattacctaaagttttattttaaactaaaactcagtaaatagtgtagccacaaaagatctcttaaaccatgccattatttgcaaaactactgtagcctaatagcaattactacttactgtgacatttttctgggtgcaagaaagactcgaaagagatactattacagtcttactccgcttatctaagcaactaagatattaagatataaacctaaatgcaagttccattttctctgcagcttttactccctctgtgtcataattttagctcacagcactcaacttctttctcaaggcagttgccatatggtgtttatgtcagactggatatatttatctcattttgcgagattccttttttagcttctaacacagttctcgaaagtaataccataccactgtttctgtacgtgttccttacaatccccatgttgttgagatgtatcagttatgcaatacaatccgaaaagtttcttggcttccagtccaagtctttgtaatctgggctaggtgtttcttcagagctccgtagttagaactgttgagtgcatcggcactccgtttgcattcggttctcacgcaggtgaacccacatgttttatccctgtcctactagttaacctcaaccaatgcgtgtaaacagtagatctgcacggaactgtaaggtgaaagagtggagagatacttgttaaagctgttgatatataaagggaaaacagtgaatgtacatagttgtgagaatcttgaaaaacccaggtccggttgaaagcacgcaccctcatgtggggtgcattgggggaggtgggggagcagttctgaacttattaggaccttgtgcctgctaagtaaaatacttagctcccagtctggcttacaccctattatagtattttaagagttttgttgtggtggtggtggtggtggtggtggtggtgctggtggtggtgggtggtggtggtggtggtggtggtggtggtgtatggtggtttttaatttgaggcagctattttgagactgcccctctgtatcagtgagtgctaagcccatccacagctcaaattctgtttcatatcttcttttttgactagacatatagatgtaacttctgatcctccagaggctgaaacaggaagatgacttgaacccagggaccacagggcaaaggagggaaaaaaaaaaattcctgctttgaaaattcctatatcatttagtgtgcagtaacttctaaatcgctgctgtggggtgcttgagggacatagcatttcttctcctttagtccttatagtaggaagttagggtgaggacagcaaagctcagaggtcactttctagagtcacagacctaacccagcacggctcacttgaagacccattttttcggctataaatggtcgttagcaaaaatgtctcattgcattaatatcttactgacataaattactgtttttgcgactgtgcatttggggaaaatatacacaaatattaaatgaacttcaaataccgaggagaaattgtataacagctcacctccgtgtgagctgcatgggactttttcaccggtgcaggtctaaggcatttgtttaaagcctctgggttttgctcgttttgtgtcagcattagtacagtggttaaaaggccaagagtcttcctaaactcagttcctgttgtttgctgaatctgttacctgagcaagttaatcagcccgttttggtgttcttgtctatgaaatggaattaatagtagtgattaatatgtagttattaaatatatcttgacaaggaattttagaaagcactgtgactgtccttggtaagattttagttgtgataggaataaaacacacagttcagaaagtgggcgaggaaacagggcagcctcttccttgtctttcactgcacagccatcaggcatggtcctctgagtgtctccttgtcacgtgactggatattgtagctagatgagaaaaccttatacctcaaatattgctgaatggaaggcaacgtagtcaagctctggagtggccataacacaggcgtgcccttgtcactgccttagagagtagaggcacacgattactaaatcccctatggtgcttcaggttaatactgctcttcatattcaaggggcgaccagaaaaggaaaggagaggctcggtgctgaatatggaactttcagttttgacggctaggaatgctgcatctataaacggcaggatgtggggagatactgaaaaagatggatgatggggggggctcttttttgaagattttaattgtgtgtgtatatgggaaagggatatgtacacatgagtacagatgcctgagaaatctggaagaaggctcaaggtctcctggagctggacttacaggtcctctgcaagaacgactattgagccatctttccagcactaagggaaggtgtgtgtttttagtagaactggcgagggcggggtggagggggaggttggctttgaggaactgaaatctaatcattaaactccttaaaagccaaaaactttgcaaaggcagaggtttacttttaacccaaaactaaggaagataaatgtgtgatgtgtagagtataggtggcgatagagagtagggaaaccagccgggggttagtgttcctgctgaggtgatggtagagaagctaagagtgctgtgtttgcaaggatgcagagaggagaaggcgctgcacaccgtcaccctgccaccctagcacttgagagtcaggcagacgaaaatagttgcaagttgtgagcaagccaggtctagatcgtgagaaaatgtctcaaagcgggagttaggatgaattaggtagattgtacatacttggatgatagtgatggtgagaatattggtggtgacaggacaatgtgtgtgatgattgtattgatgtcggacttgtccgagataaggcagtgcaacaccggaaccaggtttagttagaaacttaccttttagaccaaacgtacacttgatagccacttaaactttaccttttagaccaaacgtacacttgatagccacttaaactccacgctacagtggccagctaacttggcatggcgcaaattaacatgacccactgtgcagcaagttttagccctgttattgtttaagaaaagatgctgtacatatcagtatggcagacagtaaattagcatttcgttgcaagtatgttacacaagcactcaaataaaaaaatttaattaggaataactgaaatgaacatttacgatggcttgaaatactaagattagtataatactgaaacctgtccatagcctaaacaggcaggtagtttgaatatgtatgtatgaaacgtgtaggcgggttgataaaattgaaaagttgtacttcaaataattgggtcctgtatactttgtaagtgaaagttaattcgtgttagtactgactccagggtctgttgtgctaaattgtactggactgggtgggtgtgaggtggggtgagtctccaaaatgaattaaatatatgtattcgcgcgtgtttttaccaaattttgctccagatgtttgtgatctgggggctgtagagattaaagtctagagaaacttcccagattgcaaccgaagatactcatttctctaaccaaccgttctgtatttgtcttgtgtactgtggatttccagcagctttatgaataatgggattgccaaataacactaaataaaggagctaggcagataagtttgaaattcagataccatcccccatttagtatacggaatctacacgtgtaaaaaggagcattcctttacgtggaattccagtttagcaagacatcctggattttatctgacaaatcttagtgactttgaaaacaaaacaaaacaaacaaacaaaaaaagcctttaagaaacctgtaaaagagaagcaaaacgaaaaagttatgtgggccggccacgcggaggtgaagccctactgcagtcggctctcttccaaaccgtgcctaaaaatagggagaaggcaggcgccccacgttcggcgagcgtgcgcactagactcgccgggcacggctttcccgccagtttctgcggcgagcagccgcggccgcgccggggtggagcgctgcgggccgcgccgggcggccggagcgggaaggaggtgccggaactttccccgccggccggggcacaacgtggctcgcccgcccgccgccatctttacagcgcccgccgggagcaccggggctccggaaggcgcgccgagcggacggagctcggcccgaggccccggcaggcccgggcgtgcggcaggagtccccagcccgtgaccgcnnnnnnnnnnnnnnnnnnnnnnnnnnnnnnnnnnnnnnnnnnnnnnnnnnnnnnnnnnnnnnnnnnnnnnnnnnnnnnnnnnnnnnnnnnnnnnnnnnnnnnnnnnnnnnnnnnnnnnnnnnnnnnnnnnnnnnnnnnnnnnnnnnnnnnnnnnnnnnnnnnnnnnnnnnnnnnnnnnnnnnnnnnnnnnnnnnnnnnnnnnnnnnnnnnnnnnnnnnnnnnnnnnnnnnnnnnnnnnnnnnnnnnnnnnnnnnnnnnnnnnnnnnnnnnnnnnnnnnnnnnnnnnnnnnnnnnnnnnnnnnnnnnnnnnnnnnnnnnnnnnnnnnnnnnnnnnnnnnnnnnnnnnnnnngcagagggcgcggccggcccgccggagggagggagggagggagggagcctccgccctggggcgcccggcgcgcgctgccggccggcggcggagaggaggacgaggcgccgctgcgctccgcgtggtccgccggctcccacaccatggccctggctgaggtagtagtttgtgctgttggtcgggttgtgacattgcccgctgtggagataactgcgcaagctactgccttgctagtgctggtgatgctcagcgccgcggaggacaatggccggggatcccctttgttttccggggcgcggggaccgcacggccggcgcggaaaccgttagctccccgcattcccgcaggggctgcgggccgaggcggcggccgcggcgccttccggagcccgcggggagagcgaagccttcgcgattgctccccgagaggagccgcggcggccgcggcacaactttccgcctggaagggttttaactcgtgccgggttttagtttgtctgttgttgggtttcgttctcgaggtgcgcggcggagtgggcgagcggctccgcgatgcacgactgcggtcgcggtcagaacagtcaacgctggaattccaaacttttacgtcgtaacgttttaggggtctgggtttctataggaccgcttcgtttaagagttttaaaatgtaagcctaaagcaaagtagagttttggttttaattgtttataactccttaaacagggttgactttatagttgaatgcactattcgggtctttttttttttttaatgtataaagctaaataaattatttttactgagtgctgtgtttttgttttttctattttttttcttttggtttaactttggaagctcgaatggccatgctggtgtgggggagggccagccttagacttttatgttactatgcttctctatgtctgcattttattaaagacgagtagatcagagttggaagtacgacttccgagagagccgagtattaatgtctaatgacatttgattcttaacctctattagtaaagtacaggttttgtagaaaaagtgtagtttagataatggaaactacccggaactctgtgtggaagaacttgtattttctagttttatttctccaagaggagacatatgatggtaagttgtagtccttttgcttttccaaccttcctctttgatttgtgcataatggttttgatgcagtgtagtaaattttctgtggcacttggatgcttgctttttggggggtggggggcaagtctgtatctcctgtccctttcgataggagtttggtgcttttgtaatttaaaaatgatgcagtgctttgatgaagcttagttttagaccttgaaggcgcccttaata

SEQ ID NO: 82 - DNA, 5977 bp, Mus musculus
cgactgggctaatggcgtcggcgggtctgggcacccggggcgggcatcgctgaagcttgtggccagctcggccggtgacgcccgccgtggccaggccccgcggcagcgggagggacctgcccgtctggtgggctcctgagccggcgccggtggagcctggtggggctgcaccgctgcgggcaggtttcggcgagcggccggcggcggtgcggggcggcccggggggaactcgggcacgcctcgggagacgcagcccggctccggccgtgcgcccgcccgcccgcccgcccgccgagccctgggccccggctaaggaagactgaggagccgccggctggctgcgggccgcgcaagctgctgacagtgcctgcttggtagtgctggtcccagatcggcggtgacctggagggaccatgtcctgcaccaacagccccgaggctgtgaagaagctgctggagaatatgcagagcgacctgcgggccttgtcactagaatgcaagaagaagttcccacctgtcaaggagactgctgctggaaacataattaacatgctttggcagctaatggaaaacagccttgaagaacttaagctgcttcaaacagttcttgttcttttaacaaccaacacggtagttcatgacgaggcactttccaaggctatagttctctgttttcgactccacttcacaaaggacaatattacaaataacacagctgctgctacagtccgacaggtcgtgactgtcgtcttcgagaggatggtggctgaagatgaccgtcacagagatatagaacctccagtgccgatccaaggaaacagtaacagaaggtctgtcagcacgctgagaccctgtgctaaggacgcatacatgctcttccaggacctctgtcagttggttaacgctgacgccccttactggctagtgggcatgacggaaatgactcggacatttggccttgagttgctagagtctgtcctcaatgattttccacaagtgtttttacagcatcaagaattcagttttctcctcaaagaacgggtgtgtccgctcgtgatcaagctcttttctccaaacatcaagttcagacaaggctccagtacgtcatcctctccagcacccgttgaaaaaccatattttcctatttgcatgcgtttactgagagtggtgtctgttctgatcaagcagttttacagcctcttggtgactgagtgtgaaatatttctgtcacttctggtgaagtttctggattcagataagccacagtggcttcgagctgttgcagtggagtcgatacacaggctctgtgtgcagcctcagttactaaggtcattttgtcagtcgtatgacatgaagcaacattccaccaaggttttccgagacattgtgaatgcactggggtcttttatccagtctctgtttcttgtccctcctactggaaatcctgccacagccaaccaagctggaaacaataatgctggcggcccagcctcagcaccagctaactcgggggtggtgggcgtcggtgggggcgttactctgctgccagcctttgagtatcgaggagcctggatacccatcctgaccgttaccgttcaaggcagtgctaaagccacctacctagagatgctggacaaagttgaacccccaactatcccagaaggctatgccatgtccgtggccttccactgtctgttggatcttgtccgtggaatcaccaccatgatagaaggagagttgggagaggtagaagcagagggtcccagtgtcacagagggagcctcttcacagtcgtcagaacggcgagacgagcaggcggcatccgacccgatggaccaggaaacagcagtgagcagagctgtttgggaagagatggtgagcgcttgctggtgtggccttctcgctgcgctctcgctcctcctcgacgccagcacagatgaggctgccaccgagaacattttgaaggctgaactgaccatggctgctctctgtggaagactgggccttgtgacctcgagagacgcctttataactgcaatatgcaaaggctccttgccgccacactatgctctgactgtgctgaacgccaccactgcggcgacactctccaataaatcatattctatccagggccaaagtgttatgatgatcagcccgtccagcgagtctcaccagcaagttgtggccgtgggtcagcctcttgcagtgcagcctcaaggaacagtgatggttctgacaacagcggtgatgacggacttgccagtgatctccaacatcctttctagactgtttgaaagctcacagtatcttgatgacgtatctttgcatcatttaataaatgcactttgttccttatctctagaagcaatggatatggcctatggaaataataaggtctgccagcatccaaactctcggatgcgggagtggggagcagaagctttgacgtcactcattagagcggggctgacgttcagccatgagcctccacttccacagaaccagagactacagctgcttttattgaacccattaaaagagatgtccaatattaaccatccagatattcgactcaagcaattagaatgtgtgttgcagattctgcaaagccagggagacagtcttgggcctgggtggccgttagttcttggagtcatgggagcaatcagaaatgatcaaggagaatcattaataagaactgcctttcagtgtcttcagttggttgtgacagattttctacccacaatgccttgttcttgcctacagatagttgtagatgttgcaggtagctttggactgcataaccaagaacttaatattagcttaacgtcaataggcttattgtggaatatatcagattattttttccaaagaggggaaacgattgaaaaagaattaaataaagaagaggcagctcagcagaagcaggccgaggagaaaggagtgtctctgaaccggccgttccaccccgcgccaccgttcgactgcttgtggctctgcctctatgccaagctgggggagctttgtgtggacccccgccctgccgtgaggaagagcgcagggcagaccctgttctccacgatcggagcgcacgggaccctgctgcagcactccacctggcacaccgttatttggaagtcagctgcactcagtaaaaacaatgaagtgtccctggccgctctgaaaagcttccaggagatattacagattgtgtcccctgtccgagactcagagaagcccgagccccctgccgttagcgtgcccgtacccgtccttctaggaaacctttccggcccaggcctgagcaggccgtttgtgaggacagactccattggagaaaagcttggcagatgcggctcggagacgcctgtggtgactgacgagctggaagatctgaagctctggtgggctgcctggaacacctggcacaggactggatctgaaagcacagagccgcccagctccgtcgatgagctgacctttatccccagccagcctttccttacagccttagttcagatcttccctgccctctaccagcacataaaagctggcttcagcatggccgacttgcagaagctgggcgtcatcctgcacagcgctgtctctgtccccatcagttctgacgcctctcctttcatccttccgtcttacacggaagcagtcctgacaagtttacaggaagctgtgcttacggccttagacgttctccagaaggccatctgtgttggaccagaaaacatgcagatcatgtacccggctatatttgaccagttgctggcgttcgtagagttttcctgtaaacctccacagtatggacagctggaaacaaagcacattgcaaatgccaagtacaaccaggcggaatgggtagccttgaattatgtaccgtttgctgaaagatctttagaagtagttgtggatttgtatcaaaaaacggcttgtcataaagcagtggtgaatgagaaagtcctccagaatattattaagactctcagggttcctctcagtttgaagtattcatgcccttctgaaagcacgtggaaactggcggtagcctctctcctcaaagtcctgtccatcggactgcccgttgcccgacagcatgcttcctcggggaaatttgacagcatgtggccagagttagccagcacgcttgaagactttctctttactaaaagcatacctccagataatctctctattcaagaatttcaaagaaatgaaagtattgatgttgaagttgttcagctcatcagtgcggagatcctcccgtatgccaacctcattcctaaagcgttcgtgggtcagatgatgaccatgctcaacaagggctccatccactctcagccgtgctcattcacagaagcagaaattgacattcgtttgagagaagaattttctaaaatgtgttttgaaacattgctccagttttccttcagtaacaaagtcacaacaccccaggaaggctacatctcacgaatggcactctctgtgcttttaaagaggtctcaggatgttctgcatcgctacatagaggatgagaggctgagtggaaaatgccctctcccaaggcagcaagtgacagaaatcatattcgttctaaaagctgtcagcactctcatcgactcactgaagaagacccagcccgagaatgttgatggcaatacctggtcacaagtgattgccttgtatccgacgttggtggagtgcatcacctgctcatcctcagacgtcggctctgccctgaaagaggcactggctccctttaaggacttcatgcagccgccagcatccagagttcaaaatggagagtcttgagcagctgcagcacgtgtggaggaagagataccctgaggaacgccttccccggagtcttgtagaggacggacgctctactgaagtcactcttggcagctgtgtttgccttctttaaattaaagtgtaattatctgggtacagtaattcatacaaaagcctccatgttaaccagggctcctggaggagctgagcctttgcctgggtgaccgtgctgggagggacagtgagcactgcttcacacctgctaccatgtcttcagttggtgacttaaaagtgagcttatgtacagtttgttgtgtatgtgttaatgatgtactttttaaaaagaaagaaatgatatttccattcagatttttgaggctggtgttttgcaccctttttcaagtacagaatcatactaaaattttatgcaaggtggtactataacattccatactctctacaaccagcccttgagaacaaagggaactgacaatactgtgtgtataataaacaggacagttctgtataaaacagttgcatttatttaaaattttaaaatactgatgatgctaaatgctcgaagctgtatttattattaatacaaacttgtttgcttacgtttctacttctgatttgccttcttgtggggcagataagcttaccgtgtactcgtacagatggcttcatgctgtttacatgcattgtcggtgacgagaaggatcgagggagtgcaacagcagaggtatgatggctgactgcacctctggaatgcaggtcctaacgtaacagagacatgttgtagcaggatgaccggtcatacctcactcctttcagcctctctctgaactctcatgcctctttttacactgctgtctgaattttaaagacttttcatattttctattcctatgctttcaacatctgaaaggcaagatgactttatacttcatgaaacttttctgtgaggttttgttcttctctgttcttccttttctgggttcctcccaagaggacccagcatgaggctgacccacagtctaaagcgcgtgtcccagggcaggcgagtgctggaggagagcagaggctcgctgcgctcaggaggggctcctgctgccccaggagaggactgcagcagggcacgggcctctcacgaaactcacgttgacctagcccgc

SEQ ID NO: 83 - protein, 1464 aa, Mus musculus
PGGTMSCTNSPEAVKKLLENMQSDLRALSLECKKKFPPVKETAAGNIINMLWQLMENSLEELKLLQTVLVLLTTNTVVHDEALSKAIVLCFRLHFTKDNITNNTAAATVRQVVTVVFERMVAEDDRHRDIEPPVPIQGNSNRRSVSTLRPCAKDAYMLFQDLCQLVNADAPYWLVGMTEMTRTFGLELLESVLNDFPQVFLQHQEFSFLLKERVCPLVIKLFSPNIKFRQGSSTSSSPAPVEKPYFPICMRLLRVVSVLIKQFYSLLVTECEIFLSLLVKFLDSDKPQWLRAVAVESIHRLCVQPQLLRSFCQSYDMKQHSTKVFRDIVNALGSFIQSLFLVPPTGNPATANQAGNNNAGGPASAPANSGVVGVGGGVTLLPAFEYRGAWIPILTVTVQGSAKATYLEMLDKVEPPTIPEGYAMSVAFHCLLDLVRGITTMIEGELGEVEAEGPSVTEGASSQSSRDEQAASDPMDQETAVSRAVWEEMVSACWCGLLAALSLLLDASTDEAATENILKAELTMAALCGRLGLVTSRDAFITAICKGSLPPHYALTVLNATTAATLSNKSYSIQGQSVMMISPSSESHQQVVAVGQPLAVQPQGTVMVLTTAVMTDLPVISNILSRLFESSQYLDDVSLHHLINALCSLSLEAMDMAYGNNKVCQHPNSRMREWGAEALTSLIRAGLTFSHEPPLPQNQRLQLLLLNPLKEMSNINHPDIRLKQLECVLQILQSQGDSLGPGWPLVLGVMGAIRNDQGESLIRTAFQCLQLVVTDFLPTMPCSCLQIVVDVAGSFGLHNQELNISLTSIGLLWNISDYFFQRGETIEKELNKEEAAQQKQAEEKGVSLNRPFHPAPPFDCLWLCLYAKLGELCVDPRPAVRKSAGQTLFSTIGAHGTLLQHSTWHTVIWKSAALSKNNEVSLAALKSFQEILQIVSPVRDSEKPEPPAVSVPVPVLLGNLSGPGLSRPFVRTDSIGEKLGRCGSETPVVTDELEDLKLWWAAWNTWHRTGSESTEPPSSVDELTFIPSQPFLTALVQIFPALYQHIKAGFSMADLQKLGVILHSAVSVPISSDDFILPSYTEAVLTSLQEAVLTALDVLQKAICVGPENMQIMYPAIFDQLLAFVEFSCKPPQYGQLETKHIANAKYNQAEWVNYVPFAERSLEVVVDLYQKTACHKAVVNEKVLQNIIKTLRVPLSLKYSCPSESTWKLAVASLLKVLSIGLPVARQHASSGKFDSMWPELASTLEDFLFTKSIPPDNLSIQEFQRNESIDVEVVQLISAEILPYANLIPKAFVGQMMTMLNKGSIHSQPCSFTEAEIDIRLREEFSKMCFETLLQFSFSNKVTTPQEGYISRMALSVLLKRSQDVLHRYIEDERLSGKCPLPRQQVTEIIFVLKAVSTLIDSLKKTQPENVDGNTWSQVIALYPTLVECITCSSSDVGSALKEAPFKDFMQPPASRVQNGES

SEQ ID NO: 84 - DNA, 54200 bp, Homo sapiens
gatcacagcactgcactccagccttggcaacagacccagaccttgtctctgtaaaaaaaaatgataataataaaaaggctgttttgtctacattgaaaatctgttggtcagtgtagccaccttcatcggtgatcttagctagatctggataacttgctacaggttctacatcagcacttgctgcttcaccttgtacttgtaggttatggtgataacgtcttttcttaaacctcatgaactagcccctgctagcttcagacttttcttctgcagcttcctcaccttgctcagcttttatagaattgaggagaattagggtctttctctggattaggcgttggcttaagggaatcttgtagctggtttgaccttctatccagacagctgaaagtttgttgataccatcaataagcctgctgtactttcttctttctttctttttttttttttttttttttttttctgagacggagtcttgcgcttgttacccaggctgaagtgcagtggcatgatcttggctcactgcaacctctgcctcctgggttcaagtgattctcctgcctcagcctcccatgtagctggaattataggcgcccgccatgatgtactttcttatagtttgtttgttctttggagtagcacttttcgtttccttcaagaacttatcctgtgcattcacaacttggctcactggcacaagaggcccaggttttggcctgtcttgattttcgacatgccttcctcactaagcttaattatttctagcttttgattgaaagtgagacaaatgcgactcttccttttacttgaacacttacaggtcattgtagggttattaattggcctaatttcactgttgttgtatctcaagaaatagggaggcctgagaagaagtaaaaagatgaggaaacaacctgacgatgaaacagtcagaaaactcacattaagtttgccatcttacataggtgcggctcatgcaccccaaaatagttgcaatagtcacatcaaagatcacggatcatagatcaccataacagacatagtaataattaaaaagtttgaaatattacaagtattactaaaatgtggcacagagacacaaagtgatcacatgctgctggaaaaaaacggtaccaacagacttgttcaatgcagggttgccacaaacctttataaattgcaatttataaaaattacaattatctgtgaagcacaacaaagagaagtgcaataaaacaaggcatctctgtaatgaaatcttagagaattgttaacattacatgaaataaacatgcacagaattgttttcaacatatattttaaggcaattatttagaatcttttaaatgtatattaaaactcagaagttttataaatttgaactttaaattttcctcacaagctagataagttactacattcatctcttcctacgttcagctcttaatatttgtggcttctgcatctgtagattcaaccaactataaatagaaaatttttttttaaaacaagatagttgtatctgtactgaacatgtacaggctttcttgtcaatattacctaaatacagtataactagttacatagcatttaccttatgttaggtattaaaagttacctagtattattcaaagtatacaggaggatgtgtgtagattatattcaaatactacaccattttatataacagacttgaggatttgtggatttgggtatggggtgggaggtcctgaaaccaatcccccacggataccgagggacaactgtattttactattactattatttttcccatttttacatgggaaaaaatgtaagcatgttgcatatatgattgcaagtgggtggctagtgcaacattgcttaaattactgctggatagcacctcctttattttacatttatgttcacagtactggattctctacattttaaccattggcataattatcattaatataagatatgtttggaaacagtaattgctcgtgtatgaaattacaaacttattaaacaatattaaggaattgttaacattgttagggtgataatgatattatagtttttttttatagttaacagttgttatatttaggtggtagatacatcaatatgttcaagttccttatactattcttggttttttgtatgttcttgacattttttataataaaaaagtaaaaaaaaaaaagttagctcaagattgtttccccactttctcctgaaataatgtagagacactgacagaagaagagatgttttcattgaatctattctactaggaaagagatttttgaagtaatgtttttaaagttttactctgaaaggtaaaacagccacatgttgcatatttatgtgtttaaaacaaaaccttggatgaactaatatttttctactttgctttttagtggaatatttcagattattttttccaaagaggggaaactattgaaaaagaactaaataaggaagaggcagcacagcaaaagcaggcagaagagaaaggagttgttttaaatcggccattccaccctgcaccgccatttgattgcttgtggttatgtctttatgcaaaattgggtgaactatgtgtggatccccgtcctgctgtcaggaagagtgcagggcaaactctgttttctacaattggtgcgcatggaactttattacagcattcaacctggcacactgttatctggaaggtattgtaaaatagattggactatcagcttttaatgagtcatgcttatatattaatactttttcagttaaacttatttcttttaatttttaaagaatttccatgcatttgtgtatttgacaaaacaggaaataactgtgtcatattgtaaattgtacctcataaagagcaaattaaatattaacagccttatctctgtttctgtcttcatctcttattattatatctctcgtgatttctgcctttgcctttctgtctcctttttttcccccagttttcccaaatggtaaaaaccaggagttactaaacaacaaagggtaatcaatcccttaccatagagtagaaagcttttggggtttttgtttgttttacttttgaggtctacttatagatatgtaatttaaatataatcaaaagagaattttattaacagatgaatatcaatagcaatgaagtttatttgtagactcaccaaacaaaagtaacctccaaatggtatattgtacatgtaatgtttattcattaaattacaatttcatttttttcttcttttgaaactttctaataaaatcagcagtttattagtgatcattccctctttgctaaaagtctcatcttttttgttccatctgttccattataataaaattctgtttataatcctttcacttgcttttgtgagtttttcaaattaatagaccccaaaatgtcttcttaaaaaattaatgggctgggcatggtgactgacacctgtaatcccagtactttaggaggctgaggcagcaggatcacctgaggtcaggggttcaagaccaacctggccaatatggtgaaaccccatatctattatagtaaaagccctctttccttctgtcttgtatttcagttccatcccatagttcctcctcagatcacaaacatgcttaattctcccatacagtttgtttttaatctaatacttttctgattctaattttcctttcaagcaacttcattttttatcttcttgctgcctaattcttaatgatttttttctcacacaccttgcattgtcttattttctgtaattgatttccagactattctacttcagtctcttaaacattagagaataacagaatcaccttaaagacttgttaaagcacagatttttgagccactattgtcagccctccctgaacttgagtttctgattattttggcctggagtgagtcctgagaatttgaatttctatcaagttcctgggtgaagcttgatgctgctggttagttcagagaccacactttgagaaacacagaaattattcataggctacagttggtctttttttgtgagtgaaagatagggtcttgctctgtcacccaggcttgagtgcagcggcctgatcgtagcacactacagccttgacctgccaggctcaagcgatcctcccacctcagcctcttgagtagctaggactgtaggctcacactaccaagcccagctaatttttaaaattttttttgtagagatagtctcaccatattgccccggctgttctcaaactctaggcttcaagcaatcatccccactttatggccttccaaagcactgggattacaggtgtgagccatctccagtaattctacttttgtcctggacccctctccttacctttgtgtgtgtgtgtttttgttttgtcgtgatctctgctcactgcaagctccgccttccagattcacaccattctcctgcctcagcctcccgagtagctgggactacacgcgcccgccaccacacccggctaattttttttgtatttttagtagagacagggtaacactgtgttagccaggatggtctcgatctcctgacctcgtgatccgcccgcctcggcctcccaaagtgctgggattacaggcatgagccactgcgcctggccagctttgttcttttcttatacattaacccataaattctccattgatgcctcaacaagtcttatattttatccatttaatttaatttaattttttttttgagacaggatctcactctgttgcccaggatggcatgcagtggcatgatcacagctcactgcagcctcaacctctcctgggggctcaggtgatcctcccacctcagcctcccaagtagctgggactacagatgtataacaccacatttagctaattttgggttttttttttggtagggactgggtttcgccatgttgcccaggctggtcttgaactcctgggctcaagcaatctgcccaccttggcttcccaaagtgccaggattacagatgtgagccattgtgcccaaccttatttttttatattccatgataaacttaagaatgtataattatggccaggcacagtggcccacgcctgtaatcccaacactttgggaggtcgaggcgggcagttcacctcaggtcagaagttcgagaccagcctggccaacatgatgaaaccccatctctactaaaaatacaaaaattagctggtgtggtggtggacacctgtaatcccagctactcaggagtctgaggcaggagaatcacttggacctgggaggcagaggttgcagtgaggcgagattgtgccattgcactccagcctggatgatagagtgagactccatctaaaaaaaaaaaaaaaaaagaatgtataattactctattggtcagtttcctccaatatatagggattgataagactgtcaagtatattttttgtaacaatttgtagattcttatgctgttgctcctatgctattacttaagctatattatcaatgcattttaaatgacattttaataaatatttaggtactctttcatctactggacagagttcgagagtcctctaccactgcagacaaagaaaagattgagtctggaggtggcaatattctcattcatcattcaagggacaccgccgagaagcaatgggctgagacgtgggtattaacattggctggagtagcaaggatcttcaacactagaagatatttgctgcagcctttaggtatacgtacatttttttctgattatacaagtaattaatgttaaaagaaatttggaaaatacagacgattcttttagagtctatcttaacttagtctttatgtgtggtgtgtgtgtaagcatctgtgttttcattcgtttgtacctactgtgggctagcctctagaggatacaatgaaaggcaaaatacacgtcattcttgctatcatgggcatgaggaagtacccataattacataaataaaggcgaaatttctacaatgacgtgttacaaggagtggtactttgtgagcttcggtaagtatttgacctggccagtgaattccagatggactttcctgagaaagcaatagttttcctgagatctgtagggtaagtaggagttcatcaggcaagagtaagacgaagtgtggagagccttatagtcaatgagagaatgtaaaagagacaggagaagattgaggaaaagagatggtggatgctagcatgtttaaaggtctagaatgaggagaataagaaagagtttgattatcaaagagattgagaggtagtgaaaggccagatcatccagatcatgtagaatgtcttaggagaaagttaggaggctgggcatggtggctcatgcctataatctcaacacttcggaaggctgaggcaacaggatagcttgagcccaggagtttgaaaccagcctgagaaatataatgagatctcatctctacaaaaatttttttaaaataaaaaatcatccaaatgtggtggtgcacacctgcaatcccagctacttgggaggctgagttgcaaggcttgcttgagcctgggatgtggaggttgctgcagttagccaagatcgtgccactgcactcaagtctgcgtgacagagtgagaccctgtctcgaaaaaaaaaaaaggatttcatcctaagagcaatgaaaaaaactactgatagattttaattcatgatttgacatgatcaaatatgcacttcaaaaagatcacaaagtgcatgtcttagtgtatatgtagaatggaatggcaacaaggaaggatgacaggatgttgttggactggttaggaagctgttggttgtgtatatcagtggttctcaaacagggcctattatactcccataagacatttggcaattttggagacatttttagttgtcataactggggaaggttgagcattactgctatctggggagggtagaggcaagggttgatgctacacatcttacaatgcagcctcctataacaaagaattatacaaccagaaatgtcaatggactaagactgagaaacctggttgccgattatactactttcaattctggtggtaatgctggtggtggtagaaaaaggtgaacagagatacttttgtacatagttatgagcatgttgtacatattatctattttattatttcgtgtttggcattttttaaactaatttatgttaaagcacaagcatatttactcattccataagcatttttgtatattgttctttatgtgcacttttttctccttttttccaaaaactatttatggtgtctgatccatttagcatgttagggcttggtatatgtatttttaaatattgggattttttcatataaaatttacgtacagtgaaatgcacaaattttcactgtacatttgctaagttttgacaaaatgagcatcatttttagtaccttcatgatatttctcttaaaagctgagaacgaatagatttatatatatatatattttttttttttttttttttttttttttttttgagatggagtctcgttcttgttgcccaggctggagtgcaatggcacgatcttggctcaccccaacctctgcctcccaggttcaagcgattctcctgcctcagcctcctgagtagcagggattacagacaggcatgcgccaccatgcccggctaattttgtatttttagtagaaacgggatttcttcatgttggtcaggctagtctcaaactcctgacttcaggtgatctgcctgcctcagcctcccaaagtgctgggattacaggcgtgagccatcacgcccagcctagatttagattttttttaaatgaagacataagacagttaatgtctttgataattttttataactttaagaaatgatatttgttattttagaataagttttatatttttaacataaccacgtgcaatatataattatatctactcttttaaagggaccccttctctgacataaaatatgttaatagagaaattgcaggagtttttctccctaaatggcacgggatattctaaatctgatattaggtcaccattctgattggcaaatatagtgattcatgagacttttaaactttgatggcaacaggtagaagtgttttaattgtttgacattttaaaatgtaatttgtcaaaactcttttaaacagtttacttaaaattctgtgtttttattgtatgtaaattatacctcaatttttttttttttttttgagatggagttttggagtttcactcttgttgcccaggctggagtgcagtggtgtgatctcggctcactgaaacctctgcctcctaggttcaagcgattctcttgcctcggcctctgagtagctgggattacaggtgcccaccaccatgcccagctaattttttgtatttttagtcgagacagggtttcatcatgttggccaggctggtcccgaactcctgacctctggtgatccacccgccttggccttccaaagtgcagggattacagatgtgaggcactgggcccagccctcaatttttaataaaaagaatatggaggggaaagatgcatataactaggcaggtgttacagtttgtccagagtaggcagatagtacctattgttttataccagacctacttcaagcttttctattaaccgattgctttcccaggaatttggggtttatcccttttttaaaaaaatctggtcatttatcagctttccaaaatgaaagtccttaaaccttgattatttattttacatgtttcatagcctacttatgttgtactgctttggaaaatatcaactttcctaattttttacatcattttaatgtaggtatgtggataataatccatgttattaacaaagccagtaggcttgtttgctgtagggaaaagatctggctggacatggtggctcatggctgtaatcccagccctttggaagactgaggcaggaggattgcttgagcccagcatgggcaacatggtgaaaccctatctctacaaaaaatacaaaaattagccaagtgtggtggtgtgcatctgtagtcccagctactcaggaagctgaggtaggaggatcgcttgagcccaggagttcaagaccagactggacaacatagcaagatcccatcactacaaaaaataatttaaaaataaattagccaggcatggtggcatgtgcctgtgatcccagccacacttgggaggctgaggtgggagaatcacttgagctcagtgagccatgatcataccacatgacactctagcctgggtaacagagtgtgataccatctcttaaaaaaaaaaaagaaaaaaattctgcagctctaaaataatttaaatatgaaaactaaagtataaagttaagatttatgaatgtgacatagtttatcttaaatatttaggccaataaaaaaacatgtattatactgtcctaagttacgacttttccaatgattctctggttaagaacgagaacttcttacttaatcattaataaaggtgggtagactgaagatgttactgaaatgcttttgtttcaacctcgttgatttaattttctgttatcctttggcagaagttctgggaaatggtataaatatgtataagtacatacatattttggggtttttaatttttttttatttcagtagcttttggggtacaagtggttattggttacatggatgaattgtatagtggtgaagtctgagattttagtgcactcgtcacctacctgagttttgtttttaagattgaaacattatttgatatatccatcatcctcctcttggtgccctttgttcctatatctgaaaaatttttttactgaatttctaggttgtgataattttaattcccattgttagtaccttagtacctagtcatatattttccagttctgtaggattttaagcagaaaaattaagcaaatatgctttcaagtgtctaatatgaagagaaaatttgatcgcttttatgataatagtttttttttctcttcctaatataggagatttttcaagagcttgggatgttcttcttgaccatatacagtcagcagcactcagcaaaaacaatgaagtatctctggctgctctgaaaagcttccaggaaattttacagattgtgtcccctgtcagagactcagataagcctgagacaccacctgtagttaatgtacctgtgcctgttcttatagggcccatatcaggcatgagcaggccatttgtaagaacagattccattggagaaaaactaggaagatatagtagctctgagccacccattgttactgatgagcttgaagatttgaatctatggtgggctgcgtggaatacctggtatagaattggatctgaaagtactaagcctcctattacttttgataaactaacttttattcctagccagccttttcttacagctttaattcagatatttccagctctctaccaacacataaaaactggtttcaatatggatgacttgcaaaagttgggagtcatattgcacagtgctatttcagtcccaataagttcagatgcatccccttttattcttccatcttataccgaagcagttttgacaagtttacaggaagctgtacttacagctttagatgttctccaaaaggtaatataattttagtggctaagtaatactgcatatagttctctgaaattttttttattttgctatatatttgcggggataaattttagatcatcaagattgttttatatgtatactttgggataaactgaggattgtcaagatctaggtattttgaaaacttgtggatttctgttgcattttgaaaggtaattcatgtatgttttgaatcttaaagaagctgcctgcatcctaatgtttcacttcaccaggatttttggtttgtccacgcaagtcttcacaagaggatataatatttggaataaaagttttagtaaagtacttttataattagaaaattaataagcagtgggattatatttttttaatctgtgcttaaatttagttctgaaattattgaaagcctatattaaaaaaagaaatttataaaaagtatttttcctcatggtttttaaagagatttatttttactgtgtgtattttgttattgcaaaaaaaatactattcagataaacagatctaaaattatggagcaaattcagattagcaagcaaggctagatcaaattcaaagtgttttttagactagcaagaaaaattgatagcacaattcacagtcatcaaaatgctaagctttaaaaaaatgccaactgagtagccagccattccaacaaagtaaaaacattctaataagattggagtagatctagattctgatcacacatgttatcagtaaccatttgtgtagtgtaaattagatttctgattaactgcatcttacccaactggaatgataaaaattttcacagtaagaatttctactgtatgatgatacctcttaattacctctggaagaagtttagctgagcagtagttcttgaactgttgaaccctagttgtgttgtgcaggaaaaaagaatctggcatttaaaaaaattcagtgtaggggtattagttttctacaattgaactcaaaatacccatctttattttcaatggggaagaaaagtaattacccaccctgtccattggacatgcaaataagttgcttatagacttcaggggatggaagagttatcctatcagaaaagaaaataagacataggccctttgagatgcccgtaatctggtactctgattcagatctttgattcaggtttttatatatgtgtacaggataaacaagaaactttttttttttttcagaaaaaaatgtaagttttatttttaaaaaactctgctttagcagtgagaggaaaagtggaatcatttatcccaactactagtaatttgttcagagcttttaatagctttgaaaacagtctgaaactttggaagggttattgttgttaatttatattattttaaaattattattaatgttcacactagccattgttgtgttgtatgattacctaaatgatgtttcatagaccttgaatgtgagatttttaatgggtttctagtatctcctaacagaaaaatgtatattttattatcagagtgtttttatatttttttccacagatgtaagaaaatttttgcacaagccaaatttacttgcttttggactttatccttaaactaatagttatcgagcaaaacactttattgatagaaagctattttctttcctaagagataaactgatttctgatatcatgttttctttctaaaggggagcatttatgttgttcttcctcagtgcttttatattgtttaggacttcaagttctcagtcttctctttgttctcaaaccaccagttcccagccaagttgacttagttatatgtgctaatttatttatttatgtattgccaagttattttagcatacatagaggaactgggaatttaattatctgctttctgtatgtgctttactgtaagtcctgaagtcaggaaactgcatctgtcttattttttgctaaacttcttagtcagatggctggataccatatctgcattaatcaccggggctgccggagttgcactccaggagacagcatcacattgtatgtgaatgatgcccttggagttgtgtaacaaagccctgtcttctaaataacatgggcaagtttcttaatctttctatacttcagcctcctcatctataaagtaaaaataataagtctacaactttttgcttgttatgtgggatatttgtaaggcacttagtgcctggcatgagttaaacatccagtaaatgttagctgttgttattttcatcatcaagttctctagcaaagaccttagtacgtgccaggcactgaaaagattattattaaatgagttagtaagtgaaaccttaaacaatataagaaatcaggtgttcaatattttttcttgtcttcaaatagacagctttcaaggactaataggaaatattatctagattgcttatcagttcttagcttttggactaaaatttgttatcaggtttattctatagatttttctgatattcagacttcagaatactgaagaaaagcccataaaaactttttcttagatggagtttgttgttaaaaaattgtgggttccaaattatgcattttaaagtccccaaattgctctatatatcaactataacactattagtatgttttcttatcataaaggaccattgaaaatcaaaatgcatagttaagtcattaatttgtgttaagattcttacaaagaaattataatacttagttttctcaggtacccacataggttttttgttgttgttagacattgaaaataaaacaattcacttagagtaattcagtctctttttccacagtaattactacttgtttacttctaagagttaagatccagcaagaggttaatgaggaagaaagtagaactattacaagcagtcagtaaagagaatttttagagtgtataaattttactattcaaattcttcattatttctgagaaaaaaatattgagacatggtattagatgtctttttactactttcttacattataattataggacaatcacacttgggtatgggcagcacttgcatatctactttatatctcagtgcagttttatctaaaagttccgttatagctaaatggctacatctcctctgagggaaaataaaactaatgtgttatctaataagctaaaagccatggagtgcataaaataaattttgtacatactgtttttaaagaaactttttaaaaaagttaaatggtttgaattttggtttaagattttaagagtacctaccctctcaggcataaagtgatcatcctttttgtcttataaagcacaagtatattttagacacttcataaataatatcattaaatgtttttctcatggagaaaaatgaagacttaaacaagaaaatacgaaaagaaaaatttgtggctagaaaaaaaaacccaatttaagtattttcaacacatttgaaataattaaaatctgcagtatcatgatatgcattttattctttcttcctatcaaattatttgaagtaagaaacctagagaaactagttactatttattaaaatgttttcttatattaaaatattttattttaaatcaaatcgatatatttagatacatttcacattaaatatacacagccctgtcaaaaattaatccatacatttcttttagaaacaaattttcgtagatgacttattttcccaactgtaacacacatgattatttgtttaagttggtggaccaggcatggtgcagaaatcagatgtcatttcaatgaactgatatcacagaatttgaagtcagtgtcatcgtggtcagtcacacattcttaatggcctaatggctgtattactgaacaaatgatcagattgtagaacctgaggactgcctgggacttcactttgttggccctttttctattcttttaagaaataaatcacactgtaaaaaagaacattttttagctgattaacagtttcagcctatactttattctataacagtttaaaatagtttgtgtcctttagggctcagaaaagatggtataatacataaaataagacagtttttaagattctgtggttaaacaaatatatacacagtaaagaacttaatggagttcagattatgcattctaatgttcttattttgcttttataggccatttgtgtaggaccagaaaacatgcagataatgtatccagctatatttgaccagttgttggcatttgtagaattttcctgtaaacctccacagtatggacagctggaaacaaagcacattgcaaatgcaaaatataatcaggtaatttactgtaaattttatttactttgtaagatttcatggcttataaatacagatagttccacttaagatggactttgattatctcggaaaaggatacttttcactcacaaatatatttatacatgtctgttagcagtttaagctgaacagaaatattgtttgggaaactagttctgtgttctttttctcctcatttatgactttcctcttccaactgattcttcagaaagtttggcctttcatattactctccagtacatctttcttgaaaaatataagttcctttgtacctctttcttggttgccccatcccaatacaaaacagcttctaaatccctaagtctaatcttacttaaaacagatacctgccatgcaagatgaagaaactgtttgtactaaataagaagttgtacactactggtgtgaagtttagttggattttatataaaatatttttatagccatagttggcaaattttaactttgtttaagtaaatttctgaatgcatgcccatgctgattttgttcactcaacataaaaattataattttatatcgtccgaaagtagtttaaatatgtattaacttttctcattctatttgtcttgcaacacaatggaatcacaatagatccaactatttgcaccggtgagttaaatttcctaaaattgtcctaacctcttggcaacaaataaagtacatctttcccggttcttggtagaatgctgtatgtgctttttccaatagttttaatttttgcctggctgaaaattatttttttcatgaagtacatatctctttgaaaactttgcatgtaatataatctgacctaaaaccaaggcctgaactttaagacaaagatgctttctctttgaaaacaatatgattaatttaatctcagtttatttttaactgcatgtgaaaatattactttctaggcggaatgggtagccttgaattatgtgccgtttgctgaaaggtctttagaagtagttgtggatttataccaaaaaacagcgtgtcacaaagcagtggtgaatgagaaagtgctccagaatattattaaggtatctttttttcatttctacactttcattagatggtgtgaacattattgaaattattccttaggtaatacattatcattatattgggataaatagaaaatacaatttgtagtattatttgtaatgacttttctccaatattcatgaattgtatttagcaagccatttttctaaaagttctttttagtgaaaaatattttaacataaatatgcattaaatttgttacagttcttaatgagaacacatggacacaggaaggggagcatcacacaccggggcctgttgtggggtggggggagggggagggatagcattaggagagatacctaatgtaaatgatgagttaatgggtgcagcacaccaacatggcacatgtatacatatgtaacaaacctgcatgttgtgcacatgtaccctaaaacttaaagtataattaaaaaaaatttgttacagttcttacattttcccacataacccagtgagggggtttcttaggacaatattcctcaaggttcaagattgatgagcattcagagagaaattcacaatgcagcccatacacttaactgaacatgcatgctgacttttttaaagccacttttttagtatatggacagccatttaaaagattcttgttgattgtgttccgttcctctaaggcttatttcttgtttttccctctgttttgaaggactagccctaaaccttgttcttcctctagcatgtggatgtaccttatattgattgtataaataccagaccaacttgagctgtcttctctaaagactcatctatcccaacctttcttcattggtgattattttcatttttctttcagccatctcatacaaggattcttaagccttggatactacaagaattttctctcaactgtacttactactcaaattgtcatcctctttcagctttcctttatttccatatcccttaaacagtttgtggccttcacctagtcaccactcactctttgcctgttgtgtgttggcttacgtccatattgctccacagaaactgctttcttaaacttacaaaagaccaaatcttcatatcctcagtccttctctaatgatttatcttccctatagcatggtactggccttctgaaacctgagccttctgaaagctctttcttcccttgactttcacgatacttttctctcctcactgcttacctcaccaaaactatcctctcactttatttattgagcatatttttgaagcatctttctacaaggtgctagcaattttaaaatgaataaaatgattcttagatttaataattcaatatggagaataaagaaaggcaaacaagtaatactacagtatgttaagtgctaggtaaagaccatagtggaggctttgcattcagatagcctgacttcgaatagtccactgttactggcttactgctttatgacttttggcaaatagacctatctgagcatgtttctcgtctttaaaagaaggataataccaatactacttacatgtcttacctataatgagagaatccattgagatacagcatttaatgatgcttgccaagtaatcagtgctgaataaaaattgagttcctctgaaagacaaaaaactaagtcaactgctgaggggatttgggcaagaattaatagagatgacacttgaaaaagttaagagttaggttaaaaagggggaggcaggtattataggtaaattaagccgtgttaaagatcatggtatatttttaagaaatgttgagaaatttagttcagaacctgggatatgtctgaaaacataactgttggtcttctaagccatcataagatcagactttattctttaaccattgaaggattaaacactacaaagtaatatgaatcagtttgtgtatttttattttttttagagacagagttttattctgtcacccaggcaggagtggagtggcataattatagcttattgcggcctcaagctcctgatctcatgtgatcttcctgcctcagcctcccaagtcgctgggactacaggtgggcaccaccacccccagctgatttttaaattttttatagagactggatcttgctttgttgcccaggctggtctcaaactcctggcctcaggcagtcctctaacctccttctcccaaagcactaggattgtaggtgtgagccactgtgcctggcctcagtttatatatatgtatacatcttttttcttttttttgagacagactcttgctctattgcctgggctggagtgcagtggctcagtcactgcagtctccacctcccgggttcaagcagttctcctgcctcagccccctgagtagctgggaatacaggcacacaccaccacgcatggctaatttttgtatttttagtagagacggggtttcaccttgttggctaggcaggttttgaactcttgccctcaagtgatccgctcacctcagcctcccaaagtgctgggattaaaggcatgaaacaccatgccgagccactcagtttgtatttttaaaggagttaaatgatctcttttctataatcccatttcattgatgccacttaccacattgttttgtggttaattggacaaggctctttctccaaaattgtgaaccttgtggtgacaggcaattactgagcacatactgtataccacttcctgtttagatgtgtaaacatttttaaaaataaaatatataaattgaatggatctgctatgcttaatgtttttcttgattttaataaaatatcaattgcagtagcaaaccatacttttcttttatcttagcttgagttataaaatgtaaactcaaaatggccctatatcacttagtattcttttggttgcaaatgacatacactcaggctctgactagctttaacaataaagggaacttttgggcatgcttaattggaaaattcaaagatagaggaaggccattatgactggctgatccagtggttcagcagtatcatcaaaaaccacatttctttctccagaaagttctgctaagaattgaccatatcgtttctcttcatagctgtaggccagtaacaagattatatgtccaataggaagagagagaggaagagagagagtgtgtatgttcctgcatacacacattcacacacttctattcttcttcttaagttcctaaaattaatttttagtggatcaactttggtcccatacccactcttgaaccaatgattatggccagggaaattgattggattcattggcttaatcaactcatcatctctttgcctgaattcccaaactggaagtagggacagttcctcccaaagcacatggattatatggaggtggaaggaggggaaggggataaatagattctgggtgtgctaattatctgttaatgaaggcacatttcaagctaatatgtaatggttaatatgtatattgtatgagtattcagtaataatttgtgtggaagatgatgatatttggttttatgtccttgaaatatgaaaatttttctacttttagacccaaatttttacgtaacagcagaatttttactctaatgcaaattgcctgacagtatgccaaaactgtttgtcagtggtgctgtgtgttagttcattatgatgttttggttaatctagtgttctaattgcaagatagaactgtgatcagagaaattcattctgaaccaccaaattagttcttttaataaataaaagccacctgtctcaaaagttgatcagttgaaaagagaagtcactatacttagtcactatatatctagtcactgtacatgactcaaacgctctactcctgtacccctcaatggtcaaatcttaaattatcagttttactgaactatttggagaaggaaaaaagtacacaaaaatagaagtaaaaaagtacacaaaaatattagagtaggatataaaattcaaataattttacagatagaacatacaacttcaaagtattgacattttatgttgtgtttactcttccctcaccattagtgggaaaatacagtcatgtactgcttaaggaccgagatacgttctgagagatgcatcattaggccgtttcatcgttgtctgaacatcatagtgtacttacacaaacctagatgatatagcctacttcacacctatgctatatggtctaacctatatatgtggcagatgactgcataagcaatattgaccctttgcatatgggatatccacatcagccaaattattttttgctggaataactatggcagaattttctttttctttttttttttttttttttttttttttttgagacagagtctcactctgtcgccgggctggagtacagtggtgtgatctcggctcactgcaacctctgcctcccgggttcaagcgattctctgcctcagcctcctgagtagctgggactataggcacgtgccaccacacccagctcatttttgtatttttagtagagatgaggtttcaccatgttggcccagatggtcttgatctcttgacctcgtgatccacccaccttggcctcccaaagtgctgcgattacaggcgtgagccaccacgctcggccagaattttctaatccataacatcgggttaagaaaaggtacagaattgtgtttccttctcttaacttttcagataatatccctattatttatgatgaaaaactgaggttcaaaaatgttatttatgtaggctcattgtttataagatagagataggatttaaaagtatatctttccaggcagtatttgaggactacgtctgagaattggcctttctgcgaaataacatcctttttaaatgaaaataccatcctttttaagatgaaaatacctatgctattttttctctgctgtagtttttcttaattaaaattgtgtgtgtatgttttaattaatgcttatattaaactgtctttattttcagactcttagggttcctctcagtttgaagtattcctgcccttctgaaagcacatggaaactagcagtatcctctctcctcagagttctttctattgggctacctgttgcccggcagcatgcttcttctggaaaatttgacagtatgtggccagaactagccaatacttttgaagattttctctttactaaaaggtcagctcattcatttttaaaattaagacaagaagtggcacattatatcttcagttgctctaaaaacagttgtctttattcattaacaaagtaattgattataaaggttgctagattgtattaaaaacacacctgaattagccatttatccattgggtacattatccatgaacaatggagatttttgctttttgtatttttgcttataagacaggaatattatatataaaacaatacaaatgcatcatatttaagaattttaacttaataaaactaagaagattcagtttttaatttgatgcccattgggcattgcaagagaaaaacaatgttagaaaatcagtgtattaccagaataaataggatgagtggcaatataatgatcagctctttaagatgtttagatttgtcaaagattaacaattttcattgtatggtatctaatttaaagcttgtatttaggatgctatttcaacccctcactgaactacttactgtaggatgattggaacacagactacattttttgaatgaagaatttgctgaggtccatctagagttgtgctattcagtacagtagcaattgctagttacaaatgactaattaaaaccaaactttaaataaaattaaaattttcttcagtctctctaggcatgttttaagtactcattgccacgggtgactagcagctgccacactgggtagagcagattattggacatttccatcatcacagaaagttgtgttgggcaggacagatttaaagcgtgcccttttactaaatgtggacttgtctgtaatagctgtaatagccaggcagtgtttaatccttctagcacaagtaattatcgtttgtgttacattggtgaaattcttttctgagacagagccttgctttgttgcccagacccaagtgcagcagtgtgatcacagctcactgcagcctcgacctcccaggctcaagcaatcctctcacctcagcctcctgagtagctgggaccacaagtgcacaccaccacacctggctaattttaaaattttttgtagagatggagggtctcactgtgttgcctaggtgtcttgaactaacttctgggctcaagtgatcctcccacttcggcttcacaaagtgctgggattacaggcatgagccactgtgcctggccaattttttaaatgtttgtatccatcaatcattttttgatattgtagaatgataccgtgtactgctaaataaccatttaacattattagtttgaagccacttaaattatggatttgatgtacttgaagaaaaaaactacattggcatatggataatgattgagtcccccacagaatgaattaactgaaaaaaattttctttactattctaatatggtttagttattcagtaaaaaaaatttctagggtgcagaagattaacttgcattttcccagtaaaagtttgtcttatagttcagaatttaaaataataacaggtgatcctaatttctgtcttgcaagtggtcagactttgttttgtagtttatgtatttttcacttctagaaatgttattgataccaatgtaagcatactctgtttctgaaggaaaaattataggcgctcataaactatattcaaacaaattatgttttcatctttaaaataactctgaaaatttgagttccttcgtagacataagagcctgagtcactgttaatttgtatcaagcacataggttgagaaatttacatttttccttttattttctaattgtctatatatgcttaatgcccccattaacaaattgaataagctttcagatcagctttttttttttttttgcaatgagtaaaacttctttaagtattgctttccctagcaaggtgtggtgacacacctgtaatcccagctactttgggaggctgaggtgggaggattgccgaggcccaggagtcaaatccagcctgagcaacatagcaagatcctgtatataaaaaaaaatggttttctatgtaaaataataatattttatataattttgtattaatgcagttgtagtataatttcatttaaaattttagctctaaatttggaggtttttttttgcttgtttttgtttttcttgagagtttttctgccatcttccttattcttgaatttcttattaaatattcttcactttctggactttattcttattttattaaatcccgttttctgaagttttttaatatagaaaagtggacactggaaccaaaggccaaataatagtattttacataattttgtatcaatgcagttgtagtataatttcatttaaaatattttgcctgattatggctctacttaccttaaaggtttgagtatgtttggtgtgttggaaaatacattacttaagaagcagccagcatagtggataagagcattggcttggcaaccagactacctggattcaaatcccagtagtactactttgtactactttttagacaagttattaaacctttcagtgactcatttttcctcatctgttaaatgtcaataataatgctccctaacttacagggttattgtgaggattaaatcacttaaaatgaatgaatgcttagaatagcacctggcatgtaagtactttaaaatgcttgtttccactattattgtcattaatgttttttctttcttttaaaaaaggtgacattatccatattaattcccatgaaacaactattattttaaaccaaaattctaaaggccaaaactctaaatgactgagacttggaaatttagctctaaatttggaggtttttgtttgtttttgtttttcttgagacagtgtctcgctctgtcacccaggctggagtgaagtcgcatgttcatggctcactgcggccttgacctcctggcctcaggtgattctcccacctcagcctctcttgtagctcggactataggcatgcaccaccacacccagctaatttttgtattttttttgtagagatgggattttgccatgttgcccaggcttggagttatttttaatggctaaaaataataaagcttctaaattcagctctcaagtaacacagtatcagtattctaagttatggttattctagttacagatttaagctttctactccatggagtagttgatgaacaccctagattgagagtcaggagacctgtgacctggtcctgacttgctgtctactttctgttgatcgtgagctggtcctttcccatcactaggcattattttctttatttgaaagacaaaaagaaggccaaccggagtacgtaatcccagcattttgtgaggccaagttgggtggattgcttgggcccaggagttcaagaccagcctgggcaacatagtgagactccgcctctacaaaaaaatttaaaaattagccagatatggtggcatgtgcctgtagtcccagctacttgggatgctgaggtgggatgatcacttgagcccaggaggttgagattgcagtgagctgtgactgtgccactgcactccagcctgggcaacagagtgagaccctgtctcaacaaagaaagatgaaaagttatttgttggagtaattgtaaaggtccatgaatgtttaatcatggacagcttatactggataaagccagtttagtttttgtttcatagttcaaaaatactttaaggctcaaattgaaagcttttattggtcagttgatactaaaagtgcagtgttaagagaacttaaaaaccatgcacattttcagtttcataacaggttttctctttgtttttattttctaaataattgataactttggaggtcataaacttttagattttaaaccttacttaatgccacatatgtactatgttctatagctgaagtttatcagtagtgtttgaacagtaggaagattgttttggaaagttgcttggaatagcaagacttaatgaatttaaataagactaatacttgattattttttatattggtacctttataaatcctttaacctaattaatacatactctaagactttaagaataaacatatctctgtctgtaatattccccaaactttttgatctgcaagatgctttggcaagggaatacaataacacagaaaatacaaataaaatgaactagcagaaaagaaagcctttgcatgtcgttgagggctataagtaaacagtttaagagaaagaaaaagacaaagttgaaaaacacaaggactgcaatttggtagacacttgaagtctattagaaattcatttagccaactttgagtaccaaaacatggtagttataaaggagacacaatgggtgagtgggaagttacacaatctgtggaccttatattaaaaatcacaaagtactgtgcaaaagaattgaaaacacatgtttacacaaaaacttgtacactaatgttcatagcagtgttattcatagtagcaaaaaagtgaaattgaatgtaatatattcaatattcaatatattgaatgtaatatagtagcaaaaaagacaaattgaatgtaatgtattcatacagtggaacattattcagccataaaaaagaatgaagtgctaatgcatgctcaaacatggatgaacatttacaacataatgctaagcggaagaaactagacacaaaaggctatatattgtatgatcttgtttatgggatatatccagagtaacaaatccatagagacaaagtagatttatggttcccaggagttgaggggaagggagatgagggagagtgactgctaatgggtacagatctttttgggggggtgatcaaaatgttctggaattagaaatggtgatggttgtacaactttatgaatatactaaggaacactaaattgtatattttaaaagggtgaattttataatatatagattatattgcaacaaaaattttaatatgtcatacagagagaactgacaaaatacaaataacactttataagtttgaaggctcttttttattttaaataaagattcatgaaaataaatttttaaagattactgtagttttcaaatttaaggaatttaagatcttacatggcttatttgtaacctgcagtattgaccattgccccttataatttataggtaaattctgttagtcagcatttttaaaagctcaatcgatgtttttgatatgtttgctagttataaattaaataactattagttatccagtttttagttttgtatgctactctcttccctcatcatatgatattttaaaaatctagttcagtgtttctgatatatgatccaaatagtattaatattattaatgtgttgaaataaacacactaatacaccttagcacacagtatacacactaaaagtattaatattgttagtgtgtatatttctataaacactaataatatagaaatatacacactaataatattaatattattttattatttttgcctcttcattttttgttgatcatcaactcatccttagttacctccaccatcatcacaaatcttttaatattactaaacccttaccttccttggttataaattaaaattaaacacaacttttgtctctagagatgcagatatagtctgtgaagctgctttgatggcagtgattgtgaaattcctctgattggttcaggtttgggtaaatttctttcagtttttttactctagttcctactaccaatttatagttagcttaggacttggacaccagaatctaagttctatgagaaatggactgagtctgtcctgttcacagctagatcttgaacacccaagaatataatacctgatgcaaagtagttggtactcagtagatatttgttgaatgaaaaatgtccaaatcaaagaaaccacagtctgatgcccatatattcctatatacaaaattgtacattatacttaatatacagaagtgtatattaaacctaaatgttctaatactatttttacatctacaacataaaaaagaataatgtaggctcaaatatcagataaatctaggttgagattgtggcctcatcatttacttaaagtgtgttcttgggcatattagtaggcattctaagtttcagttccctcttctcttgattatataataattactacatggaattgctatgggagattaatacaaataaagctcatagtactgtggctgtctaactttttagctgtcattattctaacagttattactatcctattctcaactgtttttaaatagtatcttgctgttttttaactttatgtccattttactgttcactcttatgagccacagagtctggaatccaccttggttctctcagaactattgattttctttgttcttgttggaacaattttctgctttagaaaatctgcatcagtcttcttctttacagattttccctctttattgtaaagatctttaatccattgtatttattacaaattaatgattaatggactgtctctgagtgaataattcagcagctgaactaaggctgtcttaaataaccaccaatataagtgaattcaggtaacaccacaatggtaacttttgctctgctgcagatgatagctctttacctttcgttgttttttcattcataatattgaaataagtttagttctacagattttatttagttcaagattggacctagtgtttttgtagttagagtatcatgtttgtaattagcttagtcatttaaactaatgactttaatttacaacattactcttttaaataaataataatgccccaacctgggttggaagacataattttttgacatttgaatactgtttttctattttgtttgtatttgcagggaatattttatctttaaaaatcaagtgtttttttttttttagcatacctccagataatctctctattcaagagtttcaaagaaatgaaaatattgatgtcgaggtaaggaggctatttaaaatgttttcctgtgaccatttttgaaaccaaatagtaaaaatgtttgaactatacagttgctgaaagaataaagtaataggttaagattaaaactgaaagcattaaaactcttacaggttaaacgttgatgtttaaaggactggcattttaaaagtgacttccttagatttgttacagtcttgtgctttgtgcgtgttgtcccaatacttagttgtgttcatttaataagtttaaaaagagtttattcgatgaaataaatccatcagtcaggaggcatatatttgagagcttactctgcagtttgacataccagatgtttctggttcaaattaatcagaaagttgcttgaatttttcagtttttaatcagctgtatatacagcctatggaattcttaaagcaaatagtgttttttaaagaatatattttgaggctgggaactgtgactcgtacttgtaatcctagtgctttgagaggctgaggcaggaggattgcttgagaccaggagtttgagaccagcctaggcaacatagcaagacaccatctctacaaaaaaaaaaaagttttttaagttaattgggcatggtggttcacacctgtagtcctagtttctcgggagactgaagtgagaggatcacttgagctcaggagttggaggctgcagtgagctacagctgtaccactgtgcttcagcctgggcaacagagcaagaccctgtctctgaaaaaaaaaagtaaaaaaaataagtaaaaaagtaagaaatatgttttgaggattataaatggaatttaaataagcagttcttgtggttgtggatttttttgttgatggtagggttttggtggtttttttcctttaagtgggatagaggaacttttaagtaaataaaatcaattacattactttaaaatatacatttggccgggcgcggtggctcacacctgtaatctcagcactttgggaggtggaggcaggcagaccatgaggtcaggagattgagaccatcctggttaacatggtgaaaccccgtctctactaaaaaaaaaaaaaaaaattagctgggcgtggtggtgggcccctgtagtcccagctacttgggaggctgaggcaggggaatggcgtgagcctgggaggcggagcttgcagtgagccgagatcacgccactgcactgcagcctgggtgacagagcaagactccatttcaaaataaataaataaataaaatatacatttaaaatgcataggcattatcatatggaaacaaaatattgcctttcgtgccattactgtattaaagctcttgtggactttaaagggcaaaataacatactacatgttagagataaactatttgacaaaaatgaatataactttaatttctcttacagctgatagtttttggttataaaaagtgatttaaatgttattcttaatcctattttgaatattttaattctaacatgggtaaatttcatatgctatttttctctagagccctatttgcagttatcatgctgaagatcaacatttgtccaaatggttggcatagtaaacagttatggtactgactattttgtattaaagttactaggacagatgagagaaacagattagtagtcattctgtatgttaacattaaaatgtttgtgtacttctttaaaggagagttctttaactgattttcatttaaagtaaaatttaaattttactctagaaattattttagtctctttcaaagaaaacaatacatttgcatttgcctcttttgttttaggtagttcaacttatcagcaatgagatactaccttatgccaattttattcctaaggaatttgttggtcaaataatgacaatgcttaacaagggctcaatacattctcagtcatcttcatttacaggtatgttaatttttttaagtattaaaaagtattgaagtacttttgaagaaactgtcagtagaaatgtttaatcctatgattttggtaatgtaaactggagaatggtaaggtgatttttaggattgtaatatagaactaagctttatgaggagaaatgttatgacatgactattctgtggaatagaatgtttttattccatgtttctattctgtgaaatactgtgtttctgatcatatatcagaaacactgaactaaattttttaaatatcataactgcaaactgtgaagaattaaattgcaaagcactttatggaatccatggatgtcactgcaggctgacagaagttaccagttttgtgaagtcatagattggaaaggaatataaaaatatgaatgtatattctgccacttagcagtcaattaacttttgagtctcagttttgtaatctttaaaatggagatattaataccatcttctcaggactataaattacagagttcatttaaaaaaataagatgcctcaacattttttaagggaattaacatttactcagtgccaactatgtacaagatactatgctagaatgttatattatttctcacaacatttctgtgaggataggtaagaccatattacaggaaagaaaattgatttagaaaggttgaaaaaattgctcacaatcttagggctagaggccaaattcatgcttaaaaagaactacatgcttcttttcattatatcatgctgccttaattgggaactgatatataaattactgtttgttattaattctctttttgtaaacctgagctcaagtcttaaactgtggcatcagccaggtgcagtgattcatgcccataatcctagtgttctgggatcgctaggtgggatcccaaggtgggaggatcgcttgaggccagtagtttgagaccagcctgggcagcacagtgagactgcctctgtctctacaaaagattttaaaattagctgggcatggtgacacatgcctgtagtcctagatactcgggtggctgaagtgggatggcttgagcccaggaggccgaggtgacggagttatgattgtaccactgcattttagagtgcactctgggcaacagagcaagactcttgtctcatatatatgtatatatgatttaaaaactacattttgggaggccgagacgggcagatcacttaaggtcaggagttcaagaccagcctggccaacacggtgaaaccctgtctccactaaaaataattagccaggtgtgatggcatttgtctgttatcccagctacacaggaggctgaggcaggaaaattgcttgattcgggaagcggaggttgcagtgagccaggatcacactactgcactccagcctgggcgacagagcgagactgtctcaaaaacaaaaaagaaaaaagaaactgtaaatttgtgccatgcagatccttaatcctcagaatttactagagccttaactagcttctcctattttgtgctgagcattttaaagagcatttatgtgtacagtttgaccactagatgtctctcatactgctcacttcacatactagttcttttttctagcccaaacagtttttaaaactggcctggtaaagtgtgggtttagcaaacatgagaatctcggggaaaattttaaaccccgcttatcttaatgtagccaactttttattattaagagtatgtgaaaatatttaacttttaataaaatacacattaagaacaatattcacaattaggtataaatgtccaaagttaaataagggctattgagttaccaagtatacttttactggcagttttctgataatatatcttgctatgtatagtattaaatttaccaagacaagaaaggtgcatggacattctttcagtgactttgccatatgacacatgtcttctcagcactaacttggagttttccaacacctgggaagcttcacgtgagagtccttcaccaccacaacaatgctcctgctcattcctctcatcagacaagggcaattttgtaagagtttcagtgggaaatcattaggcatccactttacagttgtaatttggctctttttgttttctttttgtttcggatcttaaaataccattgaaggacagcctttttcttcagtcaataatgtaaaaaagacagcattgacatggttaaattcccaggacctcagttttttacagataaactaaatggctggtatcatcgcttacaaaagtgtcttgaacttgattgagcttatgttgaaaaataaagtttgtagttttcattaaaaaaaaaaaacttagagttttccttaaacatatacatacaaaacttttatttgctaaacaaggccaacctgtaaacacagaggttccagtgatgattggccttttgcttttaagtatgatctgatagtcagagctcacagacatttgaggaaattctctaacaccaaagagaaagaccaaaacaaatgaagagagagtaaaagaaattggaaggaaacagataaaatgcagagtcactgaaaacataaaaccagttaggatgatcaaagagataaaagaacaatttaaaaaatgctacataaaaggagcagtagaaaaagaaagaaggctgggcacggtggctcaggcctgtattcccagcatttgggaggccgaggcaggaggatcacttgagcccaggagtttgagacaagcctgggcaacatggcaaaaccccatctctacaaaaaatacaaatgttagctgggtgaggtagtttatgactgtagtcccagttacttgggaggctgaggtgggaggatcacctgagcccaggagaacaaggctgcaatgagctgtgatcacaccactgcactccagcctaggtgacagactagagactctgtctcaaaaacaaaaaaaacaagacgagaaagaactcatagaaactaaagatgtggagttcagtgaaaggtagaaaggagaagtaaaatgaatccagggagcctaacatctgacaaagagagaacaaagaaaatctaggagaaggaattatcaaagaaataaactgaagaactgaagaacaaaacttccagattaaaaatagtcagtatcaaaaacagtgaaagaaaaaagacccaaatcaggcatgtcattatgaaatatcagaatacctgggataaagagaagaccctaaaagatttcagaaagaaagaaaaaaagttcagtataaaagacattggaggccaggcacagtggctcatgcctgtaatcccagcactatgggaggctgagatgggtggatcacttgaagtcaagagttcgagactgtcctggccaacacagtgaaaccctgtctctactaaaaaaaaaaaaaaaatacaaaaattagccaggtgtggtggtgcgtgcctgtaatcccagctactcgggagtttgaggtgggaggatcatttgaacctgggaggtggaggttgcagtaagctgagatcatgccactgcactccagcctgggtgacagagtgaagaccctgtctcaaaaaaaaaaaaaacaaaaaaaaaaaacagacagtggaattctcagacgcagtattggatgctaaaagacattgaagcagtggttttagagttgtaaatggaaaggacttttaacatggaagctccatgttaaaactcatactgttggccaagtatgagtgtaaaacagtaattctccaatttcagcatgcatcctaatcaaccagaggacaagcaattgctgagttgtaccccctgaatttctgattcagtaagactgggaggcatgtgaatttacatttctaacaagttctctggtaatgctgatgctgcagggtacatttttgagtaccataatatatgacattttcggaggtacatgcgctcaaaagttttacttctcattgattgtttcttaggaagctacttcaaaatatgctctgtaaaagcaaagtagtaaaccaaggaaaaataaggcatgaggctgggtgccatggctcacgcctgtaatctcagcactttgggaagccaaggctggcggatcacgaggtcaggaaatcgagaccatcctggctaacacagtgaaacactgtctctactaaaaatacaaaaaattagctgggtgtggtggcacgtgcctgtagtcccagctattcaggaggctgaggcaggagaattgcttgaacccaggaggcagaggttgcggtgagccaagattacaccactgcactcctgcctgggcaacaagatgagactctgtctcaacaaaaaaaaaaaaaaaaaaaaaaaggagatcttggaagtgggatctaacttgagagaatggaaacaatttccagagtgatggcaaagactagtttcaggatataacagaacagcgtgtctagagagcaactgccggactggagcagaggtcacgttccaggaaagaagttgctaggagagggaaaaagagagaaaaagagaatactgcaagtttgaccacatgaaaaactattgtgaagtatattttacagtgctgttttatggtatagaaagaccaaatcaagaaatatgttgaatagaagtgatgaggatcttgccctgtttttgatcttgtgagggggaatttgtttctctctacatgcgcacacacacacacacacacacacacacacacacacacacaaaacaaaaaaaaacaaaaaaaaaacacattttcactatatgtatgctattagctataggttgttctaggtgcctttcaccagattgaggaatttctctctattcctagtttgctaagcattgttatcattaaagctcattgatttaacttctattaaccatcaaaatttgttaattttacagaagcagagattgatattcgtttgagagaggaattttctaaaatgtgttttgaaacattactccagttttccttcagtaataaagtcacaacacctcaagaaggctacatctcacgaatggcactctcagtgcttttaaagaggtcccaagatgtactacatcgctatatagaggatgaaagattaagtggtaaatgccctcttccaaggtatatatttcattttattaaagaaataaatgtattgttgtactaattgttgataacaaggaaaactctgaaaagcaagtgtttttgtaagtgatctgaactaagctgaagttgtttataatcttatttatcccatatggtgtaaatattcacaggttttcctgcagatatattaacatgttttgttatggggtgcttttttagatccctcatggagattatgtaacatatgatacataggtaccaaattacctttttgaattaaaaaaaaataaactgaattccaaaatatatcttcttccagagatttctggataagtacttgtggatctctatgagcacatgatattatttctctaaagtgaaaatcataaatcatattttaggaatatcctagtttgttttacagtcatttgcaggtttctctctgtgtcagctagcctgatcttaggtcttcttttcatccaatctgcttagttaagcccatggacctaaactgatttatttctcatctgttcagcctgtgtcagtggaaggtgcactaggcttttctgatcagccaaggctaatcagagttggagtacagaccagaattcaacaaaggatacagtcataaattagggttaggtttgcaaatacttttataatgtggaaattagagtttaaggcataactaatgaagcaaacagaaaataacatgggaaaacaaagttatcaaagtcaggaaagacgaaaatcattgttcccgtctcataaggtaggactggagaggcaaatcaccagtgttaaatctttgtgcacattttaatttacttataataaatttctgaagttggaattgacctgtcaaaaggcacagacattttatagcttttgatatgcattaaccaaatttcccaacagagatttataccaatttacattctcccaggaatgtgtgaatgtccctttcctcaatttttagcatttttaaattatttgccagtttatcatttatctttttctaatttgatgaatgaaaaatagtcatgtggtactttgctttcattttttaattaccaatgcatattagctatttgtatttcttcttttaggatccagtgtattttgaatttctagaacttaaattataactccttatactcaaatttatacacaaaaacactccaaagacagatgttagtaatttggctatgggcatgattgaaaattgatttctgaagtatacttggaaatgtggtaataaggttgttttgagtggaatattgttagaacatatttatatattataaaatattatttgatttcagaagaaaactttcaccttattttttaatgttctaagtctttactttttaactactacctttaaattgagccttatttataattgtcctatgaagttatattgtatcattctgtgtttgttgcagtatcatttaattgttttgtaaaaagctacattgcaacacaataaaatacttcaatgcttacaataggaagtcttgaaatagtatcctgacatggtattagaaagtcttatctgcagaataacacaaatgcacaccaggaatggggagggatgagggcggaccagagaccagaagagctttgtttttatgaggagaaagaagggaatcacgctactcttgttgactctttactccaagttcattcttcattgctaatgtctccaaatagtgctaccttaggattgatttccagaatgtttcttgtttgtattattagaaagttaaataagtaccattgtaattttgaatatactttcaacagcatggtagaatatatgccatgtggtaatagtagtctttgtttccatttaagctttggcaaatctcttttagtactaattagtttaaaaaaaaaaaaacttgtagagaagttttaaaagcatgtattataaaatgttttaagggcagggcacagtggctcatgcctgtaatcccagcactttaggaggccgaggcaggaggatcacttggcagggggatcacttgagcccaggagttcgagaccagcatgggcagcatagcaagcaagaccttgtttctactttaaaaaaaaaaaaaaattagccagacaatgtggcatgcccctgtagtcccagctactcgggaggctaagtgggaggatcacttgagcgcaagtcaaggctgcagtgagctgtgatctcaccattgcactccagtctaagtgacagagcaagaccctgtctcaaaaaatcaataaataaaaataaaacgttttaattttaagtagttatgtgaaatatcttacaaataaatttaatttttcaggagtagattgccccacctctttattaattgataagtcatggcaagaataactacaaatttgatttgcacactgaagtacatataaataaaatgatttttacttttatatgaatttaaaactaacattaaccttgcattgtattgtgttcagtatttttcaaaagttcatctatttgtacaaacttagtttaaaaaacaaacatacctggcaactttaaaatcttaatggaaatgatttcctatctctttttcaggcaacaagtaacagaaattatatttgttttaaaagcagtcagtactcttattgattcacttaagaaaactcagcctgagaatggtaagtgcttagaaacagttattctaaattcgtaacatttatgttctatttgtgatggacttttgtctgttaatttaactgaattataggaacatagcagtcattagacttcttttctccagttctcatgacaacaaagcatcaagtccattaggatgtcaattaagtaaaattaatttgtgatgttttcattttttatgaagcagtctaccttacttttttttttttactatattgttctgaagtcaggttattgcaagaataatccatatttcatatatttttaatgtagaagataattgacttatttggggacaggtggaaaagggctttatcatctattcgtactgatttactttgcagatacaaactgtataaataactttgaatcatttttaccattctttctcatttgtttgccctttctgttgttcattcctgtccagtccattctttacatgatagccggaaatgatttttccatagtagggctttgatcatttatttcctcatcctcccaaagcaaaaaaatatttttcatttaccgtttcctaccaaattgcaaagaatactccagtctgactccattctagtcacactttatttcccacaatagatttcatttcccctactctgcactaaactaaaattctcaatcttcccaaattttttcaaccttttgtttatttcattatccagcttgtatcagcctatttggaataccaccctacttttaaaccttgtttttaatctcttaaaggtaaataatttttcttttcattgaatgcaaagcttttttatgtgtacttgtctcgaagcactctatttgtattacaattatgcatgtacatgactcatctccctttacattgttaagatttttgaggggcttttcagaccatgttttgttctattttgaatcctctacaacattgcttttcaaagtatggtttgttggaccagccattgattggcttcaacagttttgttactggtctgggacaagatagtgagctggcatcagaatataaatcagatgtgtcactaaacacactgcttggttcagctgacttttttttatacaagaagacattggtaaagaagaaaactgtgtgttggtttacattctggcacaagcttcttattttgtagcagattggcaccttaaggagcattacttttaatatccaagaaaaaagtagattcctagtaaattactaatgaatgagttgtaggatatttgttcctgtcaactattatataagtggagtaaatacatatttttcttttgttaaaattcacccattggtactttggcctagaaagggtattatactaaatcttaagaggcagtacacttgtctttattcaacccaaagggatggatggaatttctaagaaaaagcctggggcagtgtcctgaatttatcccattagagttcagatttgggttttcttcaaaaagtgtcctgggctggcacagtggctcacacctgtaatcccaacactttgggagcctgaggtgggaggattgcttgagcctaggagtctgagaccatcctggacagtgtagtcagaccccatctttaaaaaaaaaaaaaaaaaaaagaaccagaatgtgtataaagggagaaaaggaagcaaaaactcagtaactcttttttacaaagccaataggttatatgtataaggcagtgtagtaatagatgatctaactaaatgaatgttaaaaaattgttgaatggagtttgaattatgtctctgggtctatgaagtgaaaatttaaattgaatgtaaacatataagatgatataacattttagaaagctgtggtaagctttattaagaaaaagaatgacttcattatttgttttggggctttttagtgagagaagatgcatttgttagacttatttttgtttggggagattttttggtttttgtcttttttgagacaggctcttgctctgtcgcccaggctagtgtgcagtggtgtgatctgtgcttactgcggcgttgacctcctgggctcaagcgatcctcccgtcttagcctcccaagtagctgggactgcagatacgtgccaccacactctgctaattgttttgtattttcagtagagatagggtcttgccatgttggccaggctggtctgatacttctgagctcaagcagtctgcccaccttggcctccgaaagtgctgggattgcaggcatgaacaaccgccccccagccaagattttgttttcatcattttacttgatctttatttaaaattttaaataggtagtatacatatacatggtccaaaaatccaaaactgtaaaatgatatacaggggaaagttttaatatgatcttttccttattctctatctgcccagttcttactttaccacagacaaccatttttattagtttgtggatccctccagaagtttattatctaaatacaaagtacatattctaatactcccccatcccggttttgtacacaaatgaatatttgtacacaatgaattttgtacacaaatgaatatttagacagagtcttgttctgttgcccaggctggagtgcagtggtgctatctcagctcactgaaacctccgcctcctaggtttaaacgattctccagcctcagcctcccaagtagctgggaccaccacgtctggctaatttttgtatttttagtagagatggggtttcaccatgttggccaggcctgacctcaggtgatccacccgccttggcctcccaaagtgctggaattacaggcgtgagccaccacgccagcctaaaacatattttaatttaagaaatttgagttgcttcctttgagtttaagatgtcatcataacatacttttgtgttttaccgtaataaactgagggttaatttggtcaattgactctccatctgggacaacctagacaggtttcaatctatctaatcttttgttaaatgattagtgtaaagtttcacaggagacaactgaagcagaatttttaaaacttcttagacagtggctttttgacttttgtattctgttaagcagcaaaattctttttacaaatgaaatgtgatgtgaattcccaacatattaaaacagagaaaagcagaacagctccagcctgactcctcaccctcagcaatacccatcagctctattccccatttcttcttatcacacccaccctgaggaagcccctgtttggggaaaaaggttaaattaacagtatagcatttttccaagatatgtactaaggcatgaacattgatgatgtttgatgtcagtaggtattggatggaaaaaaaatccataattaagggaacactgggttaaagttaaatttgttcttttactacaagcccttaataaattgatatgaagaattagtctccaaaaggtgagagatatgaaacatctgccaaactactttatcatgagctttttcctaagaagtaaattgaggaacactagtttgagaaacacatttctttattttacagtggaagaagtaagataaagagcaattaaatgacttgaccagggacacccatcattgccttatttcagaaagaattttaggcaattgacacccagtaaattgtagtgaaaaacagaatcaaagctctctacacatagtatttatttttctttaatactataatgcctcttagatttgagacttgtttcacaaaattttaaaaatacctaaaagtctaaaaaaaatcttgcatattgggtgcccaacattatgcacaatacttataggaaaatataactaattgggatataacacttttgtcctttcagtagcaatagcatttagctgtactatttgttcatgatagtggtgaagaagccagacatggttcctccccactcaagtctacatctaatgatatacattaaagattagcaaacagtaaaagacaagaatggatctgtttgtgacagtttgtaattaaaaggaatatcaaggatattactgggaaaatcattaaacatattttgtatttcaaaagatttctacttttagcagacaactgaaaaagttattttctaattcttgaaatgtacactacatcctctcgcaattatattaaaaatgacaaaggtttggattgttctgaattgctttgttagctttcagagccttcacaaattgaaataccatttaaaatgtactttatcaaatttattgttactgatgactgcacactgagcatatattttttcccataccttattaaatatagcaggaaatctttgaaaaattaaaaagataaaaagatacaagcttgtagaatcttcatgtttcagagttttttctttacatgcagtttaaaggattgtgttcatgttaattgaataatctctatttaattccacccttttgaggttttatacttttgcattacagttgatggaaatacctgggcacaagtaattgccttatacccaactttagtagaatgcatcacctgttcttcttcagaagtctgttctgcacttaaagaggcactagttccttttaaggatttcatgcagccaccagcatccagagttcaaaatggagaatcttgaccggctacaatatatttgaaagcaggaagatagtctaaaaaatgtttgctcctaattgagtcttctgtgagaaggacatttcttactgcaaataattcttggcagctgttgttggcctcctttaaattctacttacctgagttcagtaattcatattacaggcttgcacatcaacaaaggctcctgaatgaacagcagtgtaaggctttaataaattaaactgatgggagggataattaacactacagtatacatgctaccatatctccagttggtgatttaaagtgagcttatgtacagtttgtggtgtatgtgttaatgatgtactttttaaaaagaaagaagagatatttcaattcagtcagatttattagtctggtgtttttgcaccctttttcaagtacaaaatcgtactagaattttatgcaagatggtactgtaacattccatattatctataaccagcctttgttaacaaagggaactgatatacttgtgtgtataataaatggtacagttctgtataaaatagtgcatttatttaaattttaaaagtattgataatgttaaatgcttaaagctctatttattattaatacaaaattgtttgcttacatttttacttataatttgccttcatatgtggcggataagctcaccatatgatcatgcagttagcttcatgcttattttaaatgtattattagtgaccattaaacatctgaccagtaaggtcatgtgaacacagcagcaaatagtttatgatttgctgattttggagctttgaaatataggttcttaatacattgatacatattgtagcactatgacttcatcatacctcatttctttaaacagctctccaagctttcactgaagtctgtctgttttttatattggctgtctggattttaaagacttttcatattttatatttctactgattttgtttcccctaacaacatttgtcactgtctttgaattatgacccaggcaagatgatttcagattttctaaaatcttgcctgtgaggttttgttcatatcagtgcttcattttgtaatgtcttctcaagaaaaatacctatgttaactcacaagtataaaatatgtgtgtattataaaacaatgaaaagtgtatttttggagatagtcaagcatttagaagtgcagtgaacttgctgtcacggagtaaaatgctaattatgtttcactttcctagcctagtgaaaaagaaaagtgctcttgagtacaataccttaattatttcttaaaatactgactttgacctagctcactgtattttttatttaatggattatggattacagtatttttcttctgagttaaattttcataatttatgtgaagacacaaagatgtttaaaacaatgattattcataagaaatcatgatggtctcagtattattttagtgtattggaaggtctttgatcttaatagaatttataaatttcagcttctccagaataatcataaaactgcaaaaagatattataattgagtcatgattgagatacagttttgaggctattataattgtataattatttaatttgcattatctgtaaaatgtagtaaggtctttgaggggatattttttatttacatgaattactgaatttctattttattatttcacctaaaattaaggtaaaatatggcatttcataagttctgctttcagcattttccttaaagttgtaaaaaatcaagctatgtacttattttctatatttaggtgtgttaaattgaggattagaaaaatccacataatcactgataaagcattgaaacagaataacccaagggtagtgtaccgattcagtaacatgttaaaaatattgctatgcatttattcaaaggaaaatggtctgttcttgagaaataaaagatcagttgcaattaggataattaaatagttaaatatgagtcaagtgtatgcaatatacatttatatgaaccaaagcttgctttatcaggaccatgccctacagttcaaaacataaacatagtgaatgtgttaatatcatataataaggtaataaatgccagtcttagtgtgaagcaagtgggtggcccccttggtagtataattggacaggattttcctccagaatatttcctgtcaccctccaagagtcactacagtaattgattgctggcatggaacacattgcccttgtcttgttagtatgaattgggttctccagtgactagaagaactggggtgtgtgaaagtattcgatgccaggagattcaaaaaggaagctctcaaagataagatcattttatggcacaattgagtctataaccagccctttaagcagtagtaaaaatgtcctttgtcatacttactagaaatactatgagttttttttttttttttcatttgagacggagtctcgctctgtcacccaggctggaatgcagtggcacgatcttggctcactgcaacctctgcttcccgggttcaagcagtttcctgcttcagacttccaagtagctgggattacagacatgccaccatgccaggctaatttttttaatatttttagtagagatggggtttcaccattttggccattctagtcttgaactcctgacctcaggtgatctgcccgccttggcctcccaaagtgctgacattacaggcctgagccactgcgcccagccaataccatgagttttaagcctcacatcgtcacttgctgtcactgccagtgcctgttttattcatattgctggacaacagacatatgccaccaattgtatgattaataaagtctttttctggccattttgtccattataaaggaaataaactaattgttaacttgcatagattacttcttagtttcctatgctaccaccactgccaagggagaaaaaaatacatcattttgtaatgtctttagtatttctttataactagtgttaaggttttgttaattttattgtatacatttgtaacatttattaggagccttttaggttccaaaacaaacaaaaggcataaaaaagtctagcttagaaccacttttcacttgctttcatttttaattttattcacttaacagctaacatctttcttgtttcttgttttttccattatatggttatcgattcaactcttgctatattccttaaatttgtatgtatcatcagaagaaagagatgaacaatttagtgtagatattttattctggagaataatattcaattaaattatttctacagcaggccagtaacaactagattatttgtcctttctcagtataattttaaagagcattttgttttattgtcacaatttggtaccactagtcccaggtaaccattgggccaaaggatcagttgagaaacagttaaggatgaattagcataagttatggaacagtgttagaaaacaactcaaaagtatattctttattaatgaggtggtcattattacatttgtgtcaatgaagggcagtgtagttattttaaaatgactaatattttctccccaaatacagaataattcagatgggcaaccaagttttcaagagactgctgtaggtgaagtctgtctagccaaggcagaacacttacaggagtccctaactgtgccacccttggaatgggttagtgtacaggctcagaatattgtggattacagtttttcagagaaaactaccacagatgtagacaaaaatgatctctgaaagcattgccagcagccaggtatgttccttagatttccacttaggtttggcattttggcagataagctaatcttgtataaagcatcacattttactatgcttagtgttcctgggttgtatttatctacattattagagggaatttttattttaaaaaaattgtcattcatgagaagaatgggagttcatgccacatagtattttaccaatttatataaagtgggaaaagtctttaatacttcatgatcacttgaattaaagtttttgtatctctggaaagtagaatagtgctttcatttgaatgaaaagtgtttatagattcagaaagagagatgatatctttgtatcttgatttatatacagaccatttcagaggaagttaaatgtcttacaaatccaatactttctaatgctctaacagtgttggctatttaaaagaacatgtggcaagttctatatgaatattcttggtcatctcgactaattctgaggcaatgatggacagagatgctacttcttatttaactctaggcatgttgacttttcaaagcggtttccttatttctaaacagagatgatgatcaatgagttactaattctttagaggaaaaaatgaataatttgagtgtggagttgattttaatgacagggtaattcaagttgtttgataaatttattactatattgtaagagagatctttgaccatttttcttcctttttcttggacatcactttcttccctccccttctctcttttatgtttttatccttgttaaattttatgtttacgttaccatctttcttatactttcccctgatttttctcttttaattcctctttcattctctgcctcttctctttcagctctttctctaattgtgcctattccttgttcataagaagtggagctgttagtggtagaaccactgctcatggttctaccactacaaagtggaaagtagaaatactttgcactttggccactgttgcgtttttgccaaggtaaagttcccctgccattttgaaatagctgaacaagttaaagtaatatgttccaaaaactggaagtgccataaaaaactaaaaataaaaaaaaattgtgactataactcctactgtctttatgaatacacgggattcagcagccaagatgctcacaaaatgggattgctataaatatgatggattcagcacctaaatttggaataatcatgtcttttctgttatgtgggtagagagattatatatcttttctcaaagtaaagtatttaaaacctgtttaaatgagggttttggctggcgtggtggcccacacctgtaatcccagcactttgggaagccaaggtgggagtatcacttgaggccaggagtttgagactagcctagacaacatagcaagatcctatctctagttcaaaaaaatatttttaattagggttttggttttttatgattttggggggtgggggagatatttgtttttttgaggcagacgtttaaacttttagatttatcccatcttaatattgatttatattgacactgcctacttacaagaataatttgaggcagcatattgcccatgtatttcaactattttcatttttctgttgcaaagcagtctttgatggaagacccggaatcttatagttctcatatctgagtctttctggagtgtatttggtgtctgtgtgattggttcacccagaggtcacccagaggtcaattgaaaccttcctaattatactatggtattgattctatcccctcaagtatgaaaaaattaaattttcagaccattttcagttgctgcgaatgtagttacactaagttttattttaaactaaaattcaataaacagtgcagccagggaagatctgctaaaccatgccgttatttggaaaatcattgcaatatattaacaactgcttccttctatgatgtttactagatggagaaaaatactccatacctatattgcaattttatttttatctagaaaaagaaaatattaggcttcagacccaactgtgcaaatttcatttgctttccatctcttactactacctctgtgtcataatttaacacgtaacatacaactcctgtctcttaaggcagctaccatatggtgtttatgtcagactggatatatttatctaattttgtgaaattattttttagttcccaacacaattcttgaaagtaataccactgttgttactctttctccttacaatttttatgttgttgagatgtatcagttatgtattataatcatgaaattgtattggcctcaaacccaaattttctttgtagtctaggatagatttttcatgaaagctatatagttataactgtgattgtacagattgtttatttgttttacagctaacattaagcatgattccaggtttttaattatgttccagcaacactagtgtttctttataacttaaaatcataaccactttgataatttacctttggatctgaccagtgattcatttttttcttgaatatactttgtgtttgctttctcatccccgttaagtctgaaacattattgacaccccacatcacttactctgtttaaagactttacgagtagtgagtcacatgtttaggatgatcactttgggaaaaaaaaaattatagagtaaaggggaaatgttcttgagagctttattaaaaccattaatatataaaatgaaaaaataataaacagaagacacgaagtgtctctcaatagtttagaaagaaagatttggaactttaagtaaaaatgctaggtcaagtaaaaatcctgatgtagattagattatcttaatcttatgagcatttttttttaatttggtgaagctgttttgaaactgcctgtccatatcaatgccagactatctctctacctctcaaagaaaataatttgcattaaaattcctttttttgttatgtaatgaaagtataaaacaagaatttgtacgttactcagtgtgtactgcagtcagatatagttaaaataatttttctgatgcgtaattttaaccaccatttctggagtacctagtatgtgcaggccaaggctttgcctatattattccctttaatcctcaaagtagccttgcaaagaagttattttcattttacagaagagtcaaggattagggggttgaagtgagctgcctagagtcacatacctaaagtccaggtggatcactatgtcttgctttttcaaaagcagttctttctactacagtacaatagtttcatgttttacagtccattaaaatccaagacttataaaataaactaaaaatactcttgaggcaattactatttctatgatgggcactgggacaaatatacttgaacataacaaagaactaaaaatactgtgaaaaaaagatttgtcttaacgatgaccttgaaagttgcattgggtttttattattggtccaggtttaaaacattttatctatttaaaacatatgttgtgtgttttaagaagttatgttataaataacagcattgtggttaaaagcccagagtctggggccaggcttcttagatgcaaatcccaactctgttattttactaaatgtgtgaccttgggcaagttaattaacctgttttggtgtcctcctctgtgaaatggagttaatcgtggtatttaacagaatttaaaatgtagtgtgttctaaagcgctgtgcctggagcatcatcaccactaggtggttagggaagtaaaacacatttggcacacatcattcaagaatggccagaaaatccatgtcttcccacaatagggaccaattttttgcctttcaccagacaaccactgaatgttaagaatctactgtgtgctaataactgtgtccttgctgtatgacagaagctatttggagcgctctcaagtgcttattacagctagtcaaggaaaccgcatatataaaataatactggatacaagactatacaattaaatactggtgtatcactaacaactgtttagaccctgtttttgcgttaagcattgggttagtctctgtcctcatggagttttcagttttatagggaatacagaccttttaacaagtatgtaaagtacagtaaaagacaagtacagattaaaatgaaatcataaaataggaaccttagcctagtcttctgtggttcaggttaatagtgctgttagtagtcagaaggaagttttttaaagaaatgaaaaagctcagtggttaagatagaaattaaagttagtcttgatggctacctagattttggatgagttcaaaggatatacggagggatttcaggcaagataatgtgagcaaggcatatctgtgaaatagaaaacagtgcattttggtgtattgtgtgaaacaaggttggttgtgaaggattgggtcccttcataaaattccttgaaagccaaggagagtagtttagatttgagatggcagggtctggagtgatttaagaataaattataaaaccaaggaagataaacttgcaatcataagcaggataggatatatacagtatggaaagctaagctagaaagctgttgcaattttcttgctatgaggtgatgataaagaattgattaacggtggtcatattcagaaaggatacttaagattcctgatatgcagggaggggggagaaaaagttgatggtaacagtacattatatgtggatgatgagtatattggtgttagcactgttaaaaacattatggaaaggaatgtaagtgataaagtagtataatgactaaatttagttggaaactactgctgtaacaaatctgtataccatagaccaaacaggtgtttagtggccatttaaaaatctgtgccattatggcaaaggacatttgctttggtacagaataatctgatccactgcgcagtcaatgagcagtgagggttgattcccatggcagtccaatctttgcttatcaaggaaggatggtgtgaagtttctacagactttctggtaagtgattgataggtgagtttatggtttgattgagtttttgctttgagtttatgcttagtgattgataggtgagtttatgctttatcaggtaaagcatttaactgcaaatgtattatgtttacacaaatattcttaattggaaatagtttctgaatatgcacctaaaaatgttcttatgaaatatgtcaggcaggctgatttttaacttgaaaacttctactttaagaaattgtttgggtcccatcgcctataccatgtagaatagaaacaaaaagccagttatttaatttttaatttgcaattaaactcttggccaagaggatctgttgtccaaaattacatcgtgatagcttaagaaaaaaaaaatcttactttgccagaaagggaattatacaaggatatctttatgagttgctgccaaattttgttctagaccacggccctctggcctccatgaaggatcaaagtctgggcaaagacaattctaagttgtaggtaaacatgcttttcatttccctccattccttacttttgtcataagcagtctggattttcaggggtaaaggctgatagggttgccagatacagtcattaaaaattgagaatgtgcagttaaattggaatatcagataaacaattttaaaaatatatgtaacacacatatgccaaaacactggttatctgaaattccaatttaactgggcgtcctgtattttatctgacaagctctaactacttctttaaaataatttgttaacttcctacaaaaaatctctaaatgggaggaaaaaaaaaatcccgtaagttgtctgggccaaaagcagaagtggctccatggcagtcagccttctccctaacttggcttaaaaagaaaaagccaaaaccagaagtcccaaaagcttgcgtttaaagcgggctgtgccgcagctttcccgcctgttttctgcggaatgtagcacggcagccaccccgcgtgggtggggctcgtatggttgtgtccttgctggttgggaaaggaggtgccggaaacttcaaaccacggccagggtacaacgtgtccgcttaggcggcgatatgcgccgccatcttctttgcgggcaaaggccgaaaaaagtttgggactccactcccccccgctgagccgatggagggcatcgcccgctgcctcagcactctggtgacgtggaatcggggtcccctctttcagggctgatttctggtagcacgctgacgcctgccaaggcagggaaaggggacgccgcctctgtcccggatgtaagatggcggcgcggggggcggcctggcggggcggtcacgtggtgaggagtagcgcgcgagcctccttaagtgatctctaaggttcgtccggacgcacaggagcagcggagcgcgagacgggtcttgtgtccgcacgcgtcgagtcgtcgcagtcgccacccgggccatcgccgggcccggtttcactgttaaggggttttcgtttgttccgttttcgcctcctgtagagctgaacgggaattccccgaagggtgctggggaacgggtggcctggggacttcccggctatgccttggctgctgtttggcggagccggcggcagcctctgcgggatgcccgccggcgattatcggcgccgagagcgggccggcggcgggttcgacagcgcggcgcgggtgggggcccgggtaccggactcggccgcagcccagcccccaccggggactcggagcagggaggggcgcgagcggcgcagctcgggacgtggcggcagctcctagcgggcgaagcgcgggagcgctgctcgctgcctctcgggggcagtccagaaccagttggtgtctgactgcgcttttgccgcccatttcctgctttcgagcggctgaggcgacgcgctcccctcgggcagtggagggagcggctctctccgcaggacaccgccgcttttctctcttcagagcggtggctgacgtacagaacgccggctgtatcacccgggcgccggcgccgcctctcatccccgtagctctcggggcgcgccgggagtagccgagccgctgggtgctgggcggggtctccgggcgcggcgcggggggaaggcaaaggaaaagaaggggcggcgggccgacgtcggcggcgaggaaggacggaggagcgccggagccgctttgctgccctccgcgtggtcccgtgcctccccgacaccatggccctggctgaggtagtagtttgtgctgttggtcgggttgtgacattgcccgctgtggagataactgcgcaagctactgccttgctagtgctggtgatgctcagcgccgcggaggacaatggctgggaatcccctttgttttccggggcgctgcctggggacagcccgcgaagcctcggcgcccggccggcgcggccaccacggaaaccgttagtttcacattttcctagaaggaattgaggggagtggggtggaccgcgatgcattttaaaggttgggaaagagctaagccattggattccttttcttgaaggaaggagtggaattgtgtaagataattgatacagataactttttcaccctaaaaaattctaacacttctttcagcagttaaatgccaaatttagtgtgtacctgttttacttcattctttagctgtaggttggagtggtgtgagcgatctgcagaactggcattagaggggcagaagaagtagacctgataattaaagtttatgccttaacattttagatctggtttctgatatgctctcttagtaaatctgagtgtgtctttaaaaacgtaaacccaaagcaatttaaagtttctctttaaactttgcaactcgcgaatgagaagattgaaattatttgtaggtaattgcactattccgattttttaatgtatgaggcaaacaaataaattctatgtacagtgtgctgtgaatggttttgttttttgttttttctttttagtttaaccttggggctcagattctgctggtgtggtgggttggttttttggtttttatggcctttgattctaatgttatgtggtacttacatctttgaggttttgtatgggagaagaggactaggaattgaaagtggtttctagatttgagtttaaaatctactaacactcattttgattcctgagtggccactactcctaataggaaaatacctttgcatagagaaaaaaggtagtttggataactaatgaaaatact

SEQ ID NO: 85 - DNA, 3672 bp, Homo sapiens
gagatttttcaagagcttgggatgttcttcttgaccatatacagtcagcagcactcagcaaaaacaatgaagtatctctggctgctctgaaaagcttccaggaaattttacagattgtgtcccctgtcagagactcagataagcctgagacaccacctgtagttaatgtacctgtgcctgttcttatagggcccatatcaggcatgagcaggccatttgtaagaacagattccattggagaaaaactaggaagatatagtagctctgagccacccattgttactgatgagcttgaagatttgaatctatggtgggctgcgtggaatacctggtatagaattggatctgaaagtactaagcctcctattacttttgataaactaacttttattcctagccagccttttcttacagctttaattcagatatttccagctctctaccaacacataaaaactggtttcaatatggatgacttgcaaaagttgggagtcatattgcacagtgctatttcagtcccaataagttcagatgcatccccttttattcttccatcttataccgaagcagttttgacaagtttacaggaagctgtacttacagctttagatgttctccaaaaggccatttgtgtaggaccagaaaacatgcagataatgtatccagctatatttgaccagttgttggcatttgtagaattttcctgtaaacctccacagtatggacagctggaaacaaagcacattgcaaatgcaaaatataatcaggcggaatgggtagccttgaattatgtgccgtttgctgaaaggtctttagaagtagttgtggatttataccaaaaaacagcgtgtcacaaagcagtggtgaatgagaaagtgctccagaatattattaagactcttagggttcctctcagtttgaagtattcctgcccttctgaaagcacatggaaactagcagtatcctctctcctcagagttctttctattgggctacctgttgcccggcagcatgcttcttctggaaaatttgacagtatgtggccagaactagccaatacttttgaagattttctctttactaaaagcatacctccagataatctctctattcaagagtttcaaagaaatgaaaatattgatgtcgaggtagttcaacttatcagcaatgagatactaccttatgccaattttattcctaaggaatttgttggtcaaataatgacaatgcttaacaagggctcaatacattctcagtcatcttcatttacagaagcagagattgatattcgtttgagagaggaattttctaaaatgtgttttgaaacattactccagttttccttcagtaataaagtcacaacacctcaagaaggctacatctcacgaatggcactctcagtgcttttaaagaggtcccaagatgtactacatcgctatatagaggatgaaagattaagtggtaaatgccctcttccaaggcaacaagtaacagaaattatatttgttttaaaagcagtcagtactcttattgattcacttaagaaaactcagcctgagaatgttgatggaaatacctgggcacaagtaattgccttatacccaactttagtagaatgcatcacctgttcttcttcagaagtctgttctgcacttaaagaggcactagttccttttaaggatttcatgcagccaccagcatccagagttcaaaatggagaatcttgaccggctacaatatatttgaaagcaggaagatagtctaaaaaatgtttgctcctaattgagtcttctgtgagaaggacatttcttactgcaaataattcttggcagctgttgttggcctcctttaaattctacttacctgagttcagtaattcatattacaggcttgcacatcaacaaaggctcctgaatgaacagcagtgtaaggctttaataaattaaactgatgggagggataattaacactacagtatacatgctaccatatctccagttggtgatttaaagtgagcttatgtacagtttgtggtgtatgtgttaatgatgtactttttaaaaagaaagaagagatatttcaattcagtcagatttattagtctggtgtttttgcaccctttttcaagtacaaaatcgtactagaattttatgcaagatggtactgtaacattccatattatctataaccagcctttgttaacaaagggaactgatatacttgtgtgtataataaatggtacagttctgtataaaatagtgcatttatttaaattttaaaagtattgataatgttaaatgcttaaagctctatttattattaatacaaaattgtttgcttacatttttacttataatttgccttcatatgtggcggataagctcaccatatgatcatgcagttagcttcatgcttattttaaatgtattattagtgaccattaaacatctgaccagtaaggtcatgtgaacacagcagcaaatagtttatgatttgctgattttggagctttgaaatataggttcttaatacattgatacatattgtagcactatgacttcatcatacctcatttctttaaacagctctccaagctttcactgaagtctgtctgttttttatattggctgtctggattttaaagacttttcatattttatatttctactgattttgtttcccctaacaacatttgtcactgtctttgaattatgacccaggcaagatgatttcagattttctaaaatcttgcctgtgaggttttgttcatatcagtgcttcattttgtaatgtcttctcaagaaaaatacctatgttaactcacaagtataaaatatgtgtgtattataaaacaatgaaaagtgtatttttggagatagtcaagcatttagaagtgcagtgaacttgctgtcacggagtaaaatgctaattatgtttcactttcctagcctagtgaaaaagaaaagtgctcttgagtacaataccttaattatttcttaaaatactgactttgacctagctcactgtattttttatttaatggattatggattacagtatttttcttctgagttaaattttcataatttatgtgaagacacaaagatgtttaaaacaatgattattcataagaaatcatgatggtctcagtattattttagtgtattggaaggtctttgatcttaatagaatttataaatttcagcttctccagaataatcataaaactgcaaaaagatattataattgagtcatgattgagatacagttttgaggctattataattgtataattatttaatttgcattatctgtaaaatgtagtaaggtctttgaggggatattttttatttacatgaattactgaatttctattttattatttcacctaaaattaaggtaaaatatggcatttcataagttctgctttcagcattttccttaaagttgtaaaaaatcaagctatgtacttattttctatatttaggtgtgttaaattgaggattagaaaaatccacataatcactgataaagcattgaaacagaataacccaagggtagtgtaccgattcagtaacatgttaaaaatattgctatgcatttattcaaaggaaaatggtctgttcttgagaaataaaagatcagttgcaattaggataattaaatagttaa

SEQ ID NO: 86 - protein, 503 aa, Homo sapiens
MSRPFVRTDSIGEKLGRYSSSEPPIVTDELEDLNLWWAAWNTWYRIGSESTKPPITFDKLTFIPSQPFLTALIQIFPALYQHIKTGFNMDDLQKLGVILHSAISVPISSDDFILPSYTEAVLTSLQEAVLTALDVLQKAICVGPENMQIMYPAIFDQLLAFVEFSCKPPQYGQLETKHIANAKYNQAEWVNYVPFAERSLEVVVDLYQKTACHKAVVNEKVLQNIIKTLRVPLSLKYSCPSESTWKLAVSSLLRVLSIGLPVARQHASSGKFDSMWPELANTFEDFLFTKSIPPDNLSIQEFQRNENIDVEVVQLISNEILPYANFIPKEFVGQIMTMLNKGSIHSQSSSFTEAEIDIRLREEFSKMCFETLLQFSFSNKVTTPQEGYISRMALSVLLKRSQDVLHRYIEDERLSGKCPLPRQQVTEIIFVLKAVSTLIDSLKKTQPENVDGNTWAQVIALYPTLVECITCSSSEVCSALKEALVPFKDFMQPPASRVQNGES

What is claimed is:

1. An isolated nucleic acid comprising at least 10 contiguous nucleotides of a sequence selected from the group consisting of the polynucleotide sequences hR U-001 through hR U-013 shown in Tables 1-13, or its complement.

2. A host cell comprising a recombinant nucleic acid of claim 1.

3. An expression vector comprising the isolated nucleic acid according to claim 1.

4. A host cell comprising the expression vector of claim 3.

5. The polynucleotide according to claim 1, wherein said polynucleotide, or its complement or a fragment thereof, further comprises a detectable label.

6. The polynucleotide according to claim 1, wherein said polynucleotide, or its complement or a fragment thereof, is attached to a solid support.

7. The polynucleotide according to claim 1, wherein said polynucleotide, or its complement or a fragment thereof, is prepared at least in part by chemical synthesis.

8. The polynucleotide according to claim 1, wherein said polynucleotide, or its complement or a fragment thereof, is an antisense fragment.

9. The polynucleotide according to claim 1, wherein said polynucleotide, or its complement or a fragment thereof, is single stranded.

10. The polynucleotide according to claim 1, wherein said polynucleotide, or its complement or a fragment thereof, is double stranded.

11. The polynucleotide according to claim 1, comprising at least 15 contiguous nucleotides.

12. The polynucleotide according to claim 1, comprising at least 20 contiguous nucleotides.

13. A microarray for detecting a cancer associated (CA) nucleic acid comprising:
at least one probe comprising at least 10 contiguous nucleotides of a sequence selected from the group consisting of the polynucleotide sequences hR U-001 through hR U-013 shown in Tables 1-13, or its complement.

14. The microarray according to claim 13, comprising at least 15 contiguous nucleotides.

15. The microarray according to claim 13, comprising at least 20 contiguous nucleotides.

16. An isolated polypeptide, encoded within an open reading frame of a CA sequence selected from the group consisting of the polynucleotide sequences hD U-001 through hD U-013 shown in Tables 1-13, or its complement.

17. The polypeptide of claim 16, wherein said polypeptide comprises the amino acid sequence encoded by a polynucleotide selected from the group consisting of hR U-001 through hR U-013 shown in Tables 1-13.

18. The polypeptide of claim 16, wherein said polypeptide comprises the amino acid sequence encoded by a polypeptide selected from the group consisting of hP U-001 through hP U-013 shown in Tables 1-13.

19. The polypeptide of claim 16, wherein said polypeptide comprises the amino acid sequence of an epitope of the amino acid sequence of a CA polypeptide selected from the group consisting of hP U-001 through hP U-013 shown in Tables 1-13.

20. The polypeptide of claim 16, wherein said polypeptide or fragment thereof is attached to a solid support.

21. An isolated antibody or antigen binding fragment thereof, that binds to a polypeptide according to anyone of claims 16-20.

22. The isolated antibody or antigen binding fragment thereof according the claim 21, wherein said antibody or fragment thereof is attached to a solid support.

23. The isolated antibody or antigen binding fragment thereof according the claim 21, wherein said antibody is a monoconal antibody.

24. The isolated antibody or antigen binding fragment thereof according the claim 21, wherein said antibody is a polyconal antibody.

25. The isolated antibody or antigen binding fragment thereof according the claim 21, wherein said antibody or fragment thereof further comprises a detectable label.

26. An isolated antibody that binds to a polypeptide, or antigen binding fragment thereof, according to any of claims 16-20, prepared by a method comprising the following steps of: (i)immunizing a host animal with a composition comprising said polypeptide, or antigen binding fragment thereof, and ii) collecting cells from said host expressing antibodies against the antigen or antigen binding fragment thereof.

27. A kit for diagnosing the presence of cancer in a test sample, said kit comprising at least one polynucleotide that selectively hybridizes to a CA polynucleotide sequence selected from the group consisting of the polynucleotide sequences hD U-001 through hD U-013 shown in Tables 1-13, a fragment thereof, or their complement.

28. A kit for diagnosing the presence of cancer in a test sample, said kit comprising at least one polynucleotide that selectively hybridizes to the sequence of a polynucleotide sequence selected from the group consisting of the polynucleotide sequences hR U-001 through hR U-013 shown in Tables 1-13, a fragment thereof, or their complement.

29. An electronic library comprising a polynucleotide, or fragment thereof, comprising a CA polynucleotide sequence selected from the group consisting of the polynucleotide sequences hD U-001 through hD U-013 shown in Tables 1-13.

30. An electronic library comprising a polynucleotide, or fragment thereof, comprising a CA polynucleotide sequence selected from the group consisting of the polynucleotide sequences hR U-001 through hR U-013 shown in Tables 1-13.

31. An electronic library comprising a polypeptide, or fragment thereof, comprising a CA polypeptide sequence selected from the group consisting of the polynucleotide sequences hP U-001 through hP U-013 shown in Tables 1-13.

32. A method of screening for anticancer activity of a drug candidate comprising:
(a) providing a cell that expresses a cancer associated (CA) gene encoded by a nucleic acid sequence selected from the group consisting of the sequences hD U-001 through hD U-013 shown in Tables 1-13 or fragment thereof,
(b) contacting a tissue sample derived from a cancer cell with an anticancer drug candidate; and
(c) monitoring an effect of the anticancer drug candidate on an expression of the CA polynucleotide in the tissue sample.

33. The method of screening for anticancer activity according to claim 32, wherein the CA gene comprises at least one nucleic acid sequence selected from the group consisting of the sequences hR U-001 through hR U-013.

34. The method of screening for anticancer activity according to claim 32, further comprising:
(d) comparing the level of expression in the absence of said drug candidate to the level of expression in the presence of the drug candidate.

35. The method of screening for anticancer activity according to claim 34, wherein the level of expression in the absence of said drug candidate to the level of expression is higher than in the presence of the drug candidate.

36. The method of screening for anticancer activity according to claim 33, wherein the drug candidate is an inhibitor of transcription and further wherein the nucleic acid sequence is selected from the group consisting of hR U-004, hR U-008, hR U-012, and hR U-012.1.

37. The method of screening for anticancer activity according to claim 33, wherein the drug candidate is a growth factor antagonist and further wherein the nucleic acid sequence is hR U-002.

38. The method of screening for anticancer activity according to claim 33, wherein the drug candidate is a signalling protein antagonist and further wherein the nucleic acid sequence is selected from the group consisting of hR U-001, hR U-007, hR U-007.1, hR U-007.2, hR U-009, hR U-009.1, hR U-012, and hR U-012.1.

39. The method of screening for anticancer activity according to claim 33, wherein the drug candidate is a cell adhesion antagonist and further wherein the nucleic acid sequence is selected from the group consisting of hR U-003 and hR U-010.

40. A method for detecting cancer associated with expression of a polypeptide in a test cell sample, comprising the steps of:
(i) detecting a level of expression of at least one polypeptide selected from the group consisting of hP U-001 through hP U-013 according to Tables 1-13, or a fragment thereof; and
(ii) comparing the level of expression of the polypeptide in the test sample with a level of expression of polypeptide in a normal cell sample, wherein an altered level of expression of the polypeptide in the test cell sample relative to the level of polypeptide expression in the normal cell sample is indicative of the presence of cancer in the test cell sample.

41. The method of claim 40, wherein a higher level of expression of the polypeptide in the test cell sample relative to the level of polypeptide expression in the normal cell sample is indicative of the presence of cancer in the test cell sample.

42. A method for detecting cancer associated with expression of a polypeptide in a test cell sample, comprising the steps of:
(i) detecting a level of activity of at least one polypeptide selected from the group consisting of hP-7-001 through hP U-013 according to Tables 1-13, or a fragment thereof, wherein said activity corresponds to at least one activity for the polypeptide listed in Table 15; and
(ii) comparing the level of activity of the polypeptide in the test sample with a level of activity of polypeptide in a normal cell sample, wherein an altered level of activity of the polypeptide in the test cell sample relative to the level of polypeptide activity in the normal cell sample is indicative of the presence of cancer in the test cell sample.

43. A method for detecting cancer associated with the presence of an antibody in a test serum sample, comprising the steps of:
(i) detecting a level of an antibody against an antigenic polypeptide selected from the group consisting of hP U-001 through hP U-013 according to Tables 1-13, or antigenic fragment thereof; and
(ii) comparing said level of said antibody in the test sample with a level of said antibody in the control sample, wherein an altered level of antibody in said test sample relative to the level of antibody in the control sample is indicative of the presence of cancer in the test serum sample.

44. A method for screening for a bioactive agent capable of modulating the activity of a CA protein (CAP), wherein said CAP is encoded by a nucleic acid comprising a nucleic acid sequence selected from the group consisting of the polynucleotide sequences hR U-001 through hR U-013 shown in Tables 1-13, said method comprising:
a) combining said CAP and a candidate bioactive agent; and
b) determining the effect of the candidate agent on the bioactivity of said CAP.

45. The method of screening for the bioactive agent according to claim 44, wherein the bioactive agent affects the expression of the CA protein (CAP).

46. The method of screening for the bioactive agent according to claim 44, wherein the bioactive agent affects the activity of the CA protein (CAP), wherein such activity is selected from the activities listed in Table 15.

47. The method of screening for the bioactive agent according to claim 44, wherein the bioactive agent is an inhibitor of transcription and further wherein the nucleic acid sequence is selected from the group consisting of hR U-004, hR U-008, hR U-012, and hR U-012.1.

48. The method of screening for the bioactive agent according to claim 44, wherein the bioactive agent is is a signalling antagonist and further wherein the nucleic acid sequence is selected from the group consisting of hR U-001, hR U-007, hR U-007.1, hR U-007.2, hR U-009, hR U-009.1, hR U-012, and hR U-012.1.

49. The method of screening for the bioactive agent according to claim 44, wherein the bioactive agent is a growth factor antagonist and further wherein the nucleic acid sequence is hR U-002.

50. The method of screening for the bioactive agent according to claim 44, wherein the bioactive agent is a cell adhesion antagonist and further wherein the nucleic acid sequence is selected from the group consisting of hR U-003 and hR U-010.

51. The method of screening for the bioactive agent. according to claim 44, wherein the bioactive agent wherein the bioactive agent affects the expression of the CA protein (CAP).

52. A method for diagnosing cancer comprising:
a) determining the expression of one or more genes comprising a nucleic acid sequence selected from the group consisting of the sequences outlined in Tables 1-13, in a first tissue type of a first individual; and
b) comparing said expression of said gene(s) from a second normal tissue type from said first individual or a second unaffected individual;
wherein a difference in said expression indicates that the first individual has cancer.

53. The method of claim 52, wherein the expression of the one or more genes comprising a nucleic acid sequence selected from the group consisting of the sequences outlined in Tables 1-13, is higher in cancer tissue than in normal tissue.

54. A method for treating cancers comprising administering to a patient an inhibitor of a CA protein (CAP), wherein said CAP is encoded by a nucleic acid comprising a nucleic acid sequence selected from the group consisting of the sequences outlined in Tables 1-13.

55. The method for treating cancers according to claim 53, wherein the inhibitor of a CA protein (CAP) binds to the CA protein.

56. The method for treating cancers according to claim 53, wherein the inhibitor of a CA protein (CAP) is an inhibitor of transcription and further wherein the CAP sequence is encoded by a nucleic acid selected from the group consisting of hR U-004, hR U-008, hR U-012, and hR U-012.1.

57. The method for treating cancers according to claim 53, wherein the inhibitor of a CA protein (CAP) is a growth factor antagonist and further wherein the CAP sequence is encoded by the nucleic acid hR U-002.

58. The method for treating cancers according to claim 53, wherein the inhibitor of a CA protein (CAP) is a signalling protein antagonist and further wherein the CAP sequence is encoded by a nucleic acid selected from the group consisting of hR U-001, hR U-007, hR U-007.1, hR U-007.2, hR U-009, hR U-009.1, hR U-012, and hR U-012.1.

59. The method for treating cancers according to claim 53, wherein the inhibitor of a CA protein (CAP) is a cell adhesion antagonist and further wherein the CAP sequence is encoded by a nucleic acid selected from the group consisting of hR U-003 and hR U-010.

60. An antibody that preferentially binds to a CA protein (CAP) that is expressed on a cell surface, wherein the CA protein is hP U-011.

61. The antibody according to claim 60, wherein the antibody is a monoclonal antibody.

62. The monoclonal antibody according to claim 61, wherein the monoclonal antibody binds to the extracellular domain of the CA protein.

63. The monoclonal antibody according to claim 61, wherein the monoclonal antibody binds to at least one human cancer cell line.

64. The monoclonal antibody according to claim 61, wherein the monoclonal antibody is prepared by a process comprising:
(a) providing a hybridoma capable of producing the monoclonal antibody; and
(b) culturing the hybridoma under conditions that provide for the production of the monoclonal antibody by the hybridoina.

65. A hybridoma that produces the monoclonal antibody according to claim 61.

66. The antibody according to claim 60, wherein the antibody is a humanized antibody.

67. The antibody according to claim 60, wherein the CAP is expressed on a cancer cell surface but not on a normal cell surface.

68. The antibody according to claim 60, wherein the CAP is differentially expressed on a cancer cell surface relative to a normal cell surface.

69. The antibody according to claim 60, wherein the antibody is linked to a therapeutic agent.

70. The antibody according to claim 61, wherein the antibody is linked to a therapeutic agent.

71. A pharmaceutical composition comprising the antibody according to claim 60 and a pharmaceutically acceptable excipient.

72. A pharmaceutical composition comprising the antibody according to claim 69 and a pharmaceutically acceptable excipient.

73. A pharmaceutical composition comprising the antibody according to claim 70 and a pharmaceutically acceptable excipient.

74. A kit for detecting cancer cells comprising the antibody according to claim 60.

75. A kit for detecting cancer cells comprising the monoclonal antibody according to claim 61.

76. A method for detecting a presence or an absence of cancer cells in an individual, the method comprising:
contacting cells from the individual with the antibody according to any of claims 60 or 61;
and detecting a complex of a CAP from the cancer cells and the antibody,
wherein detection of the complex correlates with the presence of cancer cells in the individual.

77. A method for inhibiting growth of cancer cells in an individual, the method comprising: administering to the individual an effective amount of a pharmaceutical composition according to any of claims 71, 72, or 73.

78. A method for delivering a therapeutic agent to cancer cells in an individual, the method comprising: administering to the individual an effective amount of a pharmaceutical composition according to any of claims 71, 72, or 73.
